United States Patent Application Publication US 2022/0282241 A1 - sequence listing, part 4

SEQ ID NO: 2 - DNA, 3981202 bp, Artificial Sequence (residues 1,990,602-3,981,202 of 3,981,202)
  Synthetic E. coli genome
aaatcgcgattcagtccgctgattccgctgcggccttcggtatcgaaccgcgcgttgctatgctctcctactccaccggtacttctggtgcaggtagcgacgtagaaaaagttcgcgaagcaactcgtctggcgcaggaaaaacgtcctgacctgatgatcgacggtccgctgcagtacgacgctgcggtaatggctgacgttgcgaaatccaaagcgccgaactctccggttgcaggtcgcgctaccgtgttcatcttcccggatctgaacaccggtaacaccacctacaaagcggtacagcgttctgccgacctgatctccatcgggccgatgctgcagggtatgcgcaagccggttaacgacctgtcccgtggcgcactggttgacgatatcgtctacaccatcgcgctgactgcgattcagtctgcacagcagcagtaatctcgtcatcatccgcagctttgcgctgcggatatctgaaccggaaataatcactatttccggttttttattctcttaatttgcattaatcctttctgattatcttgcttaactgcgctgcatcaatgaattgcgccatcccactttgcatacttaccactttgttttgtgcaagggaatatttgcgctatgtccgcaatcactgaatccaaaccaacaagaagatgggcaatgcccgatacgttggtgattatcttttttgttgctattttaaccagccttgccacctgggtagttccggtggggatgtttgacagtcaggaagtgcagtatcaggttgatggtcaaacaaaaacacgcaaagtcgtagatccacacagttttcgcattctgactaacgaagcaggcgaacctgagtatcaccgcgtacagctgttcacgacgggcgatgaacgcccgggcctgatgaacttcccgtttgaaggattaaccagtggaagcaaatacgggacagccgttggcatcatcatgtttatgctggtgattggcggcgcgtttggcattgtgatgcgtacaggaaccattgataacggtatcctggcgcttattcgccatacccgcgggaatgaaattctctttattcctgcgctgtttattctgtttagtcttggcggcgcggtatttggtatgggagaagaggccgtcgcctttgccattatcatcgcaccgctaatggtccggctgggctatgacagtattaccaccgtcctggtgacctatattgccacgcaaatcggttttgccagtagctggatgaacccgttttgtgtggtcgttgctcaggggattgccggcgttccggtgctttctggctccgggttgcgcatcgtggtgtgggttatcgccactctgattggcctgatctttaccatggtgtacgccagtcgagtgaaaaagaatcctcttctgagtcgcgtgcatgagtccgaccgcttctttcgtgaaaagcaggctgatgttgaacaacgtccgtttacctttggtgactggctggtattgattgtcctgaccgccgtaatggtctgggtgatttggggcgtgatcgttaatgcctggtttattccagaaattgccagccagttcttcaccatgggtctggtgattggcatcatcggcgttgttttccgccttaacggcatgacggttaataccatggctagttcctttaccgaaggggcgcgaatgatgatcgcccctgccctgctggtgggtttcgccaaagggattttgctgctggtcggtaatggtgaagcgggtgatgccagcgtgttaaataccatcctcaacagcattgccaatgccattagcggtctggacaacgcggtcgcggcctggtttatgttgctcttccaggcggtatttaatttcttcgtgacgtccggttctggtcaggcggcgttaaccatgccgttactggcaccgcttggcgatctggtcggtgttaaccgtcaggttaccgtgctggcgttccagtttggtgatggcttcagtcacatcatttacccaaccagtgcgagcttaatggcaacgctcggtgtgtgcagggtggacttccgtaactggctgaaggtgggcgcgaccctacttggactgctgtttattatgtccagcgtcgtagtgatcggcgctcagttgatgggctaccactaaaaatgttaagagccgcaattgcggctcttttttcattctgccgtttcagtctctacggcttcatttttggcattgcgcttcatccacaacgctagcgctttcaggctgtctggagtgaactcatcgcagcgtgcggtgatttcttccggcgtcagccagcaaacttcactgacttcatcttcctgtagtgcgaagggaccgtgagagacgcagctgaacaatgcgccccagacacggcaatttttatcttcgaaatagaactgcccgtgctcggcaaaggggacaccggcaatgcccaactcttcttccgcttcgcgacgcgcggattccagcagttgctcatcggcctggactacaccgcctgcggtcgcatctaacatgccgggtaaaaagtcttttgtctcggtacgacgctggaccagaattttgcccatgccatcatgcacgacgatgtaagttgcacgatgacgcagacactgtgcccgcatttgttcccggctggcttgtgcaatgacttcgttctcttcattgacaatatccacccattcagtacttgccaaacgacgctgttccattatcaggaaaccttctttttctggcgctcttacggcgcattttgagttgtgggtaaattacggattaatcgcgacctgcgcaatgatactttgatcattgagtgcgattacactaagtacgtcattatccagcatgccataactcgccggattaccgcctttcggaatactcacgctgccggggttgaagtggaaaatctccccccgctgttctgccactggcagatgggtatgaccgtacaccagcacatcgttctggtttaaagcaggcagattttccgggccaaaaagatgaccatgcgtcaaaaacagacgttgtttttccagtaatacctgttgccacggcgcggttatcgggaaatgcagcagcatttgatccacttcgctgtcgcagttgccgcgcacagcgataaccttatgtgccacttcattaagccgttcagcgactttggctggcgcgtaaccctccggtaaagcattacgcgggccgtgattcaacacgtcgccaaggatcaccagccactgggcaccgctttgggcaaacaactccagaacacgttccgtcgccggtaagctcccatgaatgtcgcttgcaaacatcagtttcatcactcactcctcgtcgaaaaaacgtaagctatgatactggattctgtcgttgctatcagccagattgcttcgcgctaagtgcaataaaacgctggacagacgctcgctgccactggaatgttgcataatccaccaggcgttctggcacctcatcgccatgtagtaccaggcggttaatcattagcgccagatcagtatcagcaatgcaccattcaccaaataaattcggctgacccagtactaacaaatgttctgccatcgcgaacagtttctctgcactggcttttccctcggccgttagtggcgcttttttcgcccccgcaaagacaacatccgtcggacgctcttcgcggatgggcatcagatcgctgcgcagccaggcctgaatctgtcgtgcacgcgcacgattttctaaatcaagcggataaatacgttcccaggtcggtggcgcaaatcgatcttccagatactccgcaatggcagaagattcactcaactcaaaatcatcgatttgtaataacggcacacggcgtgtctgaccgtaaccttgccacgtcggctgcaaatgttcaccgctgtcgaggtcgatggtcttgatatgaaagctcaggcctttttcctgcaacgccacccaggcggataacacataaggggagaaaaagtgggcatcactccaaagcgtgatagcgggtttactcattatgtcctcggcaataaagggggctggctatcaaactatagagcctttttgtcactgtcacgtgacgaatactcacgtaagtcgccgcgctttctatacttgtggtgttcagatgattaaacaaccggagctgcaatgatcgatctctatttcgccccgacacccaatggtcacaaaattacgctgtttctcgaagaagcagagctggattatcgcttgattaaggtagacctggggaaaggcggtcagtttcgtccggaatttttgcgcattagccccaacaacaaaattccggcaattgttgatcattctcctgccgatggcggcgaaccgctaagcctctttgagtctggtgccattttgttgtatctggctgagaaaacaggactctttttgagtcatgaaacgcgtgagcgcgccgccacattacagtggttattctggcaggtaggcggactggggccgatgcttgggcaaaatcatcattttaatcacgcagccccccaaaccattccttacgctattgaacgttatcaggttgaaactcagcgtctttaccatgtactgaacaagcggctggaaaacagcccctggctgggaggcgagaactacagcattgcggatattgcctgctggccgtgggttaatgcctggactcgccagcgaattgacctagcaatgtatccggcagtcaagaactggcatgagcggatccgtagccgccctgccaccgggcaggcactgctaaaagcacaactcggtgatgagcgtagcgatagttaacagaaacaggttctcgtgtattatttcatcctaagtaaaacaacggagaacctgcaatggcacaacctgccgctattattcgtataaagaaccttcgtttgcgtacgtttatcggaattaaggaagaagaaattaacaaccgtcaggatattgttatcaatgtgacgatccactaccccgccgataaagcgcgcactagcgaagatatcaacgatgcgctgaattatcgcaccgtaacgaaaaacattattcagcatgtagagaataaccgtttctctttgctggaaaaattaactcaggatgtgctcgatatcgcacgtgaacatcactgggtgacgtatgctgaagtggagatcgataaactgcacgcgctgcgctacgccgatagcgtatccatgaccttaagctggcagcgttaatcgccatatcgggaggctgcatgaacatagtgatcaccggagggacaggattaattggtcgccatttgattccgcgtttgctggagctgggccatcaaattacggtagtgacgcgtaacccgcagaaagccagttccgttctcggccctcgggtgacactatggcaagggcttgccgatcaaagcaacctcaacggcgttgatgcggtaatcaacctggccggagaaccgattgctgataaacgctggactcacgagcaaaaagagcgtctctgccaaagccgctggaatatcacgcaaaaactggtcgatttgattaatgccagcgacacgccaccgagcgtactcatttccggcagcgcaacgggctattatggtgacttaggtgaagtggtggttaccgaagaggaaccgccgcataacgaatttacccataaactctgcgctcgctgggaagaaattgcctgccgggcgcaaagtgacaaaacgcgagtgtgcctgctgcgtaccggtgtagtgctggcaccggatggcggtattctcggtaaaatgctgccgccgtttcgtcttggcctgggcgggccgattggctctggtcggcagtatctggcctggattcatattgatgatatggtcaacggtattctctggctgctggataacgagctgcgcgggccatttaatatggttagcccctacccggtacgcaatgaacaatttgcccatgcgctcggtcatgcgctgcatcgcccggccattttgcgcgtccccgcgaccgccattcgactgttaatgggcgaatctagtgtactggtattaggtggacaacgcgcgctgcctaaacggctggaagaagcgggttttgcgtttcgctggtacgatttagaagaggcgctggcggatgtcgttcgctgatgtggtttacagcaaacatccgccagttaactcccggtgttacaggattagtggctttgcgcgataagatcgtctggactaagtcgggtcaccatcataactaactctctgtctaaacctctatccagcatctcctgagcaatacgcagggcttcttcgtgtttgccctgcattgcgccttcttcacgtaatctgtcagcaatggtcatcagtttctccttttcttgtggtgcgcgttccgctatctcaccaataaatgcacgaaaacgctgggcatcccctgtttgtaatacgtaattaaacagggcttttagctgtctgtcattagtgttccctgtaactagcaggctaacaatttggtcgactaatcccaacagatcgcgctgacgaatatgtttctgaattaactccaacagcgccattttgcggtgttgcataatctcgtcatccggcaccacggtaatatccaccaacggaaaagcgctactatatattttgcgggctatagcaggctcggcaaattcatcaagccagcagagactataaggataaggacttctgcaaccatgataaaacagcatcgggagcaccaatggaagctctttatagcccgcatcaagatggttttgcattgccgcaatggaataacgcatcatgcgaaaagccattaattcttccggcttactttggtgctctatcactacataaatataacccactccctcctgcgttttcacagaccacaagaggtcggaataatattgccgcaggtcttcatcaataaaactgtttggttccagtttaagcgtcgttaaatcacacagtttgcgcagcggcgcgggaagatgaatatcaataaaatcccgcgcggtgtctggatggcgtaaaaaagatttaaataccgcatcatgcggcgtggaagttgtgcttattgtcatggcgttccgtcacccctcaaatttaagatgacgcgacaataaccacgattaacacccaatgcagcaggcagtttttatctttggacagcgaattcagaagtatttttagcggactgtaacttttacatttcagcggaagctgactcgcaaattccccatgaaaatactccggcagcgttagccaccggagaggaaattatttcaggcttcccttaaggaaccgttgcagacgagggctttgcgggttgccaaataactgctccggcgcgccctcttcttctattttcccctgatggaggaaaatgacatgagtagaaacatggcgagcaaagcccatttcgtgagtcactaccaccatggttttcccctcttctgccagttgctgcataatacgcaacacttcgcctaccagttcaggatcgagcgcgctggtaggttcatcaaacagtaaaacttccggttccatcgccagcgcccgcgcgatagaaacacgctgttgctgaccgccggaaagatgcaccggatatttcccctgcgcacgttcgtctatcccgacttttgccagatacttcaccgcccgctcgcgcgcttcctgcttgctcaggcccaacacctgaatcggcgcttccatgacgttttccagcaccgtcatatggctccagagattgaagtgctggaataccatcgtcaggcgtgtgcgcagtaagcgcagttgatttttatcggcgactttgagttgaccgtctttgtcgcgcaccagattgatcgtctggccattgaccacgatgctcccttcactcggtttttcgaggaagttaatgcagcgcagaaaggtacttttcccgcttccgctgcttccgatgatgcttattacatctccggcattcgcttgcagacttacccctttcagcacttcatgttcgccgtagcgtttgtgcaaatcgataacgtttaatttattctcggacatcgtattctcagtgcgtactagaaggtttcacatgctgcaaccagcgtttttccgctctgcgaaagaggctgatcaggacataagagatgattaaatagagcaccgcggcaatgccgaaggcggtaaaaggttgatacgtggcggcgttaatatcgcgggctattttcagcagatccggcaccgtggcagtaaatgccaacgcagtagagtgcagcatcaggatcacttcgttgctgtatgccggtaacgcaatacgcagcgcagaaggcaaaataatgcagcgatacattttaaaagtgctgaagccataggctctggcggcttcaatttccccatgcggaacgctacggattgccccagcaaaaatctcggtagtgtaagcgcaggtgttaagcgtcagcgccagcacggtacagttcaggccactgcggaagaaagcgttaaggaattcggttcccttaacaatctcaagcgtgtacatgccggaatagaacaccagcaactgaacatacagcggcgtaccgcgaaaaatataggtaaataaccagattggaaactggatgtatttattactggagacacgaccaatcgccagaaacagcgccaggactccgcctatcactacgctcaaaataagcagccacagagtgatcgccacaccagtaaagcgataaccgtcggtccacagcagcggtttccagtattcatgtaagatttcgatcacaggtcagccctcttcacacccacggagtagcggcgctcaaggaacagcagcacaccattggaaacagtggtgaaaaccaggtaaatcacgccacagacgatggcgaaatagaacggttcccaggtacttttgcctgccagttgggtggctttgaccacatcttccaggccgagtaagctaaccagtgcggtagatttgaggatcacctgccagttgttgccaatgcctggcagggcgtaacgcatcatgctcggaaacatgatccgccgaaacacttgcccacgagtaaaaccgaacgccgtcgccgcctctatatgtcctttcggcactgccataaaagcaccacggaacgtttcggtaaaataagcaccgtagataaaaccgagagtgataataccagcgaccatcggatcgatatcaatctgcccgacgcccatcgcctccgtcaccgtgtttagcgcaatctgcaaaccgtagaaaatcagcagcatcaacactaagtccggcacgccacgaatcagcgtggtgtacccttcgaaaatcagcccgctaagccgattttggctgagcttaccgccagcgccaattaaaccgatgattacagcgagcactacagagctgatagccagctccagcgtgacgagcgcaccctgtaaaataacaccactaaacccatacaacatgctgcctgtcctgtcgtgtgtggtgaattaccgcctcttgtctccctccggttacccgaagggagcgggctttctttcaccgatggcgattagccaccataaacatcaaaatcgaagtactttttcgctaatttctcgtaagtaccgtcagcgcgcatttcggcaaaggctttgttcagtgcttcgcgcagttcgttatcttctttacgcaggcccatgccggtccctacgccaaacagtttttcatctttaacagacgggccaccgaatttgtaatctttaccgacaggttgtttgaggaaaccttcgctggcagcgacctcatcctggaacgcggcatcaatacgtccggcagtcaggtcagaataaatgttgtcctgcccctgatagctgacgatttcaatgccttttggtgcccaatgttcattaccgaacgtctcctgggtggtgccctgcaatacgcctacccgtttgcctttcaggctctcgactgtcggctgaatgtcagaatttttcgccaccaccaaacgagaatcggcagcgtacagtttgtcggtgaaggctatttcttgctgacgtttttccgtaatggaaaggctactcatgatggcgtcaatcttcttcgcttttaaggacgggattaacgcatccagcggattttcgacaaacgtacattgcgtattgatgcgtttgcataattcctttgccagatcgatatcgaagccaaccagttcgccttgactatttttactttcaaatggcgcataggtcgggtcggtaccgatgcggatgttttgcggaatcgcagcaaacgccgcagttgcgctggagaaggccagaaccagagagaggcttagcaccagttttttcataatgtcctcaactgacagtctttttatagggaatatttacaggtttgttacacttatcgtgccataaaattgaccatcaaggcaaaatatcccgccccgttagacgtattatttttcattaaaaatgcttaagtatgcatttcaatgcaccacgatagtgcaacaaacctggcgtgcaccatgatgatcattccatcaggtacagcttcccagcgacgtatcagtcaccgtagacattaaagtcgaaatactttttcgccatcttgtcgtaggtgccgtcctgacgcagctcgccaagcgccttattgaaggcagccgtcagttcagcatcatctttacgtagccctacaccggtgccatcaccgaagtattttttgtcttttacactactgccagcaaaggcgaaatctttaccagcaggttgcttgaggaatccttcgctggcagcaacttcatcttgtaacgcagcatccagacgtcctgcagccagatcggaatagaccaaatcctggttggcataggccaccacatccacgcctttactacgccaggtctcgttagcgtaagcttcctgggtacttccctgcagcacaccaacatgtttacctttcagactatccagcgttggctgaatcggactacctttggccgcaatcaaacgagaatctgcggcgtacagcttgtcggagaaggcaatctcctgctgacgtttatcggtaatggaaaggctgctaataatagcgtcgatttttttcgctttcagactggggatcagcgcgtcaaagtcactggcaacccaggtacatttcacctgcatccgtttgcacatctcgttaccgagatcgatatcaaagccaacaaaatcacctttagcatctttgctactgaacggtgcgtaggtggtatcggttccgatacgtaccgtctccggtagcgccgcatagctggaagccgctgtggagagaccgactaacaaagacagagcgagaatgctcttcttcatacataaccctcaagtgaaaatggcttttttatgttgtgtattgtgttgtgtgtttgcaggctctttcatgcaggtcttatgccatcttgacgacaacagtaacattcaacgttaaatatgttaataagacgttgcattattgtcctgaagttgaagatagcaggtatagcggttgaatcgcagcgtttcgattgaatggcagaaacaaaatgtcgaggatttgatcgcggttgcaaaattgccctgaaacagggcaacagcggagttatgcgccctgccagcgggcaaagagatcttcaggaagggttatcgcaaactggtcaagaacacgattaaccgtctgatttatcacatcatcaagggattgcgggcgatgataaaacgccggaacgggaggcataatcaccgcaccgatttctgccgcctgagtcattaaacgcagatggcctaagtgcaatggtgtttcacgcacgcagagcaccaacgggcgacgctctttcagcaccacatctgccgcacgggtcagtaagccatcagtatagctatggacaatgccggaaagggttttgatactacagggtaaaatcaccatccccagcgtctggaaagaaccggaagagatgctggcggcaatatcgcgcgcatcgtgcgtgacatcggctaatgcctgcacttcgcgcagagaaaaatccgtttcgagggataaggtctggcgcgctgcctggctcatcaccagatgcgtttcgatatctgtgacatcgcgcagaacctgtaataagcgcacgccataaatcgcgccgctggcaccgctgatgcctacaatgagtcgtttcataaatagttgccctgtcagacttgcaggcagactttgcaggatttcggcgggagttgcaagtcagggtgccagaccggcaccctcagcgaaggcatcatccttcgttatgcatttcgagattttccacttcgttctgacgttgcactgctttggcgtcatcattacgtaacgtatcgaggaaatcgaggtagccctgatcaacatctttggtgacgtagacgccgttgaacacgctgcattcaaactgctggatatccggattttcagcgcgaacggcgtcgatcagatcgttcagatcctggaaaatcaacccgtcagcaccgatgatctggcgaatttcatcaacttcgcgaccgtgagcgatcagttccgtggcgctcggcatatcaataccataaacgttcgggaagcgaatttccggtgccgcagaagcgaggtacactttcttcgctccggcttcgcgtgccatctcgataatctgctcagaagtggtgccacggacgatggagtcgtcgaccagcaggacgtttttatcgcggaactcggcgcggttggcattcagtttacggcgcacggacttacgacgcagctgctggcccggcatgataaaggtgcggccaacatagcggtttttaacgaagccctggcggtacggtttgcccagaatacgagcaatttccagcgcgatatcacagctggtttctgggatcgggatcaccacgtcgatatccagatcttcccattcgcgggcaattttctcgcccagtttcgtgcccatattcacacgcgcgctgtaaacggaaattttgtcgataaagctgtccgggcgggcaaagtatacatactcaaacaggcacggattgctgaccggattgtcagcacattgacgggtaaacaactgcccttcttcagtgatgtaaatcgcttcgcccggcgcgacgtcacgcaggaaatcaaagcccagcgtatcgagcgctacgctttcggaagcgaccatatattctgtacggttctcgtcaatatcacgttttcccagtaccagcggacgaatcccgtttggatcgcggaaagcaaccataccgtggccgataatcatcgccacacaggcatacgcgccgcggattaagcggtttgtggcagcaatggcagcgaaaatattgtcggcttccagcgggtagtggcggaagttgtccagctcgctggcgaagatattaagcagaatttcgctgtcggaagtggtgttgatgtggcggcgtttttcttcaaacagttttttacgcaactcgtgagcgttggtcagattgccgttgtgggcaagcgtaatgccatacggggagttaacgtaaaacggctgcgcttcagaggcgctggagctgccagccgtggggtaacgcacatgaccaatgcccatattgccctgcaaacgctgcatatggcgagcttcaaatacatcgctcaccagcccgttcgctttacgcaaacggaagcagttattggcatctatggtgatgatgccggcggcatcctgaccgcgatgctgaagcaccgttaaggcatcataaatgctctggttaaccggcataacaccggcgataccgacaataccgcacatacgtctttttcctcgttaagccacatctcagagcacttacgctctgggcaagaaactactgctgctttgcagataatcaaaaaaacatctgatgataaaactgaattgcgggatcagctgacttttgctccagtcttcgcttttgctcaccccggtaaaggagtcgagaaagaagagaatggcagcaacaatcaacacaccgcgcaacgcaccgaaacagacgcccagcacccgatcggtgccactcaaccccgttttctccaccaactggcctatcacgaagttcacgatagcaccaacgatcagggtagcgataaacagtaccgcgatggcaatcccatttcgaaccagttcgtcttcaaagcccgtaaaccagacactcaggtaagtgtagtaatgactggcaacaaagaaagcacaaccccatgtcaccaggcttaacgcttcacgaacaaagccgcggatcaggctaaccagagaggaaaaagcaatcaccgcgattatggcgtaatcaatccagaccatatgtgtcccacgattttacgccctgtcatcctgttcggggcgcattctaacagaaaaagaaaacgtttgcgtagggatttccttcccgcgcatcaataaaaatggcgctgaaaaaatattcaacgccatcgactttttatgcctttgcggcatcgggcaatgcgtgtcggatgcggcgtaaacgccttatccgacctacggttctacccctgcgtaggcctgataagacgcgccagcgtcgcatcaggcaagaccgtattaattcggcgtatagcccattaccacgccacttaagccagaaagttgcttcaactcacccaggctacctttcagcttatctttgctggcatccggcccaaccagaatacgggtaattttaccctgcactggcgtggatgggctcgtataaacccgataaccggcaccgcgcagcttaccgacaatctcattcactttatcggcatttttcagcgcacccagttgcacaacataggctttacccgtcggtgcagctttttcttccacgaccggcttcggttctggcttcggcgcaggtggtgcttcaacctttggtttaggcggctccaccggtttcggcttcggtggggcgaccggtgcaggttccggttcaaactcggtgttattggctgcaatagtggccggatcgaggctcggtgctgcggcatcacctgcccgcacctcttccgctgcgccttccggcggctgcgtcggtaacgcctgggtggcggctggcatcatatcaggctcatcacgatcgcccgctttcggcaccagcgggatagccgcgaactcatcctgataatgttttttctgcccgtccagcagccctggaagtacaatcacccccagcgccaccagcacgatcgtgcccactaaccgattctgaaacttacttgccaccgcttctcctcgcgtcaatcacttccatgacatgtgcgaccgtgtggaaagaaccacacaccagcacggtgtcttccgctttagcgtccgccattgcggcatcccatgcctgcgcaacgctatcaaaacttttgccgttacccaaatgctcaagcagttgttctgccgtggcaccgcgcggcccttccagtggcgcacaataccagtcatcaaccacgcttttcaaccaggccagagttccggcaatatctttatcatgtagcataccgataaccgccagcacgcgcccgtttttcggtagcgctttcatacgcccggtgagatattccgccgcatgtggattatgcgcgacatcaaaaataacgcgtgggctctcgctcacaatctggaaacgtcccggcaaaattgcgctggcaatcccgtcgcgaatggcattttcactgacttccagcccgctggcacgcagtgccgccagcgctgttgcggcattcggttgcgggacaagcggcaacggcagattttccagcgtgccgtgagcatcgctaaacgcccagtcatgatcggtgacggaatagttccactcaacgccccgacgttgtaacagtgcacctttttcctgcgccacatcagcaatggtagaaggcatttccggctcaccgacaattgccggtttttcgctgcggaagatgcctgctttctcgcgaccaatactttcgcgatctggacccagccagtcggtatgatccagcgcaatactggttactaccgcgacatcggcgtcgacaatattggttgcgtccagacgaccgcccagccctacttccagaatcaccacgtcaagttgtgcctgcttgaacagccacaacgcgctcagcgtaccgtactcgaaataggtcagggaaatatcaccgcgtgcgctttcaatctccgcaaaagaggcggtgtgggcgctttccggcaattcctggccctgcacacgtacgcgctcggtataacgcaccagatgagggctactgtagacgcccactttgtaccctgccgccatcagaatgctctccagcgtacggcaggtggtgcctttgccattcgtacccgcaacggtaaacacaaatggcgctggtttcaggacgccaagacgcgccgcgaccaggctcacgcgctcaaggccgagatcgatagttttactgtgcaggttttccagataagaaagccagctagccagagggctcgcggcttgaggagtgcgtttgataatcatggtatccgctgattcgttacggtgagaatagcaaaagggcagagccagtggccctgcccttatcagttatcaggcctcaggttcctgatccggtaccgggggtaccactacgccttcacgcggcgcttcaggattcggcgctggcagattcatcaacttcgccagaatgctcgccagtttcaggcgcatttccggacgacggacgatcatgtcgatcgcgcctttctcgatcaggaattcactgcgctggaatccaggcggcagtttttcgcgaacggtctgttcgataacacgcggaccggcaaagccgattaacgctttcggttcagcgatgttgagatcgcccagcatggcgaaacttgcagaaacaccgcccatcgtcgggtcggtcagcacggagatgtacggcaagccgcgctcctgcatttttgccagtgccgcagaggttttcgccatctgcatcaggctcatcagtgcttcctgcatacgtgcgccaccagaggcggagaagcagatcagcgggcagttatcttccagcgcctgctcaacggcacgcacgaaacgtgcacccacaacagaccccatactaccgcccataaaggcgaactcgaatgccgcagcgacaaccggcattccatacagagtgcctttcatcaccaccagcgcatctttttcgccggtttctttctgcgcagatgccagacggtctttatacttcttggagtcacgaaacttcagcacatctttcggctcaagctcgctacccagctccacaaggcttccttcatctaacaggctatgcaggcgattacgcgctgtcatacgcatgtgatggtcacacttcggacagacctcaagattacgttccagctcagcgcggtataaaacctgaccgcagctatcacacttagtccacaccccttcaggaatgctcgccttgcgggtgggagtaatgttgcttttaattcgttcaatccagctcattagggacctttctgtctgaacctggttcgatgccagttttatctttggggacgcataatgccatttttgcccccaacagaccatgaatgttgcacattaaaacataacagcccgaaactttggataaaaaagtggtcgaaccgcggagttactttttattttgcggcgcgtgccgcagcgcgtttgtgacggattatttcgatgacgcccggcaaaatagaaaccacaataatcccgacgatcagcagcttaaggttatcctgaaccatcgggattgtaccgaagaaatagcctgcgtaggtaaaaagcagtacccacaacagtgcgccgatcacgttataagcggcgaaatgacggtagctcatgtggcccattcccgcaacaaacggggcgaacgttctgacgatcggcacaaaacgggcgagaataatcgttttgccgccatgtttctcataaaactgatgggttttgtcgagataactgcgacggaaaattttgctattgggattactgaacaacttttcaccgaacaaccgcccgatagtgtaattgaccgcgtcacccacaatcgcggcgatcagcatcagcaccaccatcatatggacgttgagatcgttggtttccagacttgccaacgctccggcaacaaacagcaaactatcacccggtaaaaacggcgttaccaccagaccggtttcacagaacaaaattaagaacaaaatggcataaacccagacgccgtactccgcgaccagctctgccagatgcacgtcaatgtgcaggataaaatcgatgaggaaataaatcaggtccatatttgcctatgccttgtactcgtcatctttcaggctgtaactacgttggctacagcctgaaatgttccgagcattattctcgttagtccgccagaaatagcgggcccattggcggttttggaagatcataccggtcagggtaatccaccgcgaccagatacagcccttccgcttttgccgttgctgccgccagcgttctgtcctttgccgccagcaactctgctatccagctctccggctggttgtgggcaccgacttccatcaggctgccgacaatattcctgaccatatgatgtacaaaagcattcgctttaatatctaccaccacataaggaccgtgacgcgtgacattaatatgcataacgttgcgccacggggttcgggactggcactgcaccgcacggaagctggtgaaatcattctcgcccagcaagcattgcgcagcccgatgcatccgttcagcgtccagcggttcgtaaaaatgggttacccctttactcagtaccgccgggcgcagccgatgattgtagatgatgtagcgataacggcgagccgtggcgctaaatcgggcatgaaaatcatcaggtacagttttaacccaacgcacagcgatgtcaccaggtaaattcgcatttacgcccaaggtccacgccgcgtctttgcgcagcgcggttgtttcgaaatgcacaacctgcccggtaccgtgtacccctgcgtcagtacgcccggcgcagaagacggtgatgggttcgttcgccacctgggagagcgccttttccagcttctcctgcacactgcggacttcgttctgccgttgccagccgtaatacttactgccgtcgtactcaatgcccagcgcaattttataaactggcggttgttgctggtcggacattagtacagatactcctgcaccagtttctcggcgatttttactgccatcagcgcgccgccaaagcgaacgttatcggccacgctccagaactggacttgctccggcataccgtagtcattacgcacgcagccaacagaaagatgcggcgtaccgctagcatcacctacctgagttgggaattcgttctcttcagagagcacaatatcttcgccttgaacaaacgcatcacgcgcttcttctgctgccagtggacgcagagcttcaaagttgaccatctgggcatgaccgtagaataccggtgcctggacgacgctagcgctaatcatcagcccttcgtcctgcaggattttgcgtacttcgtcaacgatacgacgttcttcacgcacgctaccttcgctatccggcagtaacggcagcatgttgaacgccagctgacgcccgaagaaatcttcttcgtcaatcggaatgccgttgagcaatttcgcactctgccccgctaacgcatcgaccgcttttttgccctgggcggaggcactaatcaggctggtaacgctgatacgacttaaaccgccctgatcgattaacggtttcagtgccgccagcagctggctggtcagactgtctggtacggcgatgacattccggttccggtaatctgtcagtacaaacgggtttacttccggcaccaccagcggtacgtcgggttcgagagcaaacaatccactgctgtcgatcaccaggcaaccactgttggtcgcttcttcaacccaggcagcggtagcttctttgcctgcgacaaaaaatgccagctgcgcctgcgtccagtcgaattcagcggcatcctgcacggtgattgtcttaccaccaaagcgcagttgttcgcctgcgctttcgttacgtgccagtgcataaatttccccaaccgggaactgacgttcagccagcgtttcaagcagggcttcgcccacagcgccagttgcgcccaggacggcaatgttccagccttcagacatggtggtttactccagaaatagcaaagctccctgccaatgttacagcagagagcatgaagaagagattaacgtgccggatgatgaacggcgttaaaacccagtttacacagcaaacttgccgcactggcgtcatcacaaattacatacagagaactccattcacggcgctcaagatagtttttgcgcagtttatcgaactcacccggtatcccggcgactttacgcagcggtgcgtcatcgcggcgcacatcatacaccaaatgcaccagccttttcagcgtcggttgatcgagcgggccatgcagcgtaatgcgaccaaactctggcgcaggcagtaatgtatccagcgcaacgtgctgttcatgcccaataaacttgctataagcttcaaacacttgcgtagtaccgcgtgctttaccttccagggtatagcctgcgatatggctcgtgccgatatccacttttttcagcagctcgacgttgagttccggttcgccttcccagacatccagcactacgcttaacttctggccttcattcaggcaggtcagcaacgcagtattatcgacgactgcgccacggcaggcgttaatcagaatcgctccgggcttcaggctacggatcagtttttcatccgccagatgtagcgttttgtacggaccatctttaaagagtggcgtatggaaagtcagaatatccgcgcgctggactaactcatccaggctgcggaaatcaccctcatccccacggtcggcgcgaggcggatcgcaaagtaaggttttaatccctaacgcttccagtcgcgcctgcaatcgacgtccaacgttaccaacgcccacgatccccaccgtacggtcgtacagactaaatccatcgcgttcggcaagcatcagcagggaggagaaaacatattccaccaccgcaatcgcattacagccaggtgcagcggaaaaaccaattcccgcctgcttcaaccatgcttcatcgacatggtcggtccccgcagtggcagtgccaacaaatttaatgggttttcctgccagcaaagattcattcactttcgtgacgctacgcaccatcagcgcatccgcgtctgccagttgagcgacggggattggacgcccgggaaccgcggtcacctcacccaaacggctaaataagtcgcgggcataaggcatattttcatcaacaaggattttcacgtttgtgttacctgtatgagacgagagttaaccggacaagtgtgccataatctcgcggccaggcatacttgcgaagatttcaggtataaggatacgtaatgatacaacctatttccggccctcctcctgggcaaccaccaggtcagggagataatctgccgtctggcacgggcaatcagcctttatccagtcagcaacgtactagcctggaaagcttaatgacgaaagtgaccagtctgacgcaacagcaaagagcagaactgtgggcgggtatcaggcacgatattggtctgagcggagatagtccgctgcttagccgtcacttccctgccgctgagcataatctggcgcaacgtctgctggccgcgcaaaaaagccattctgcccgccagcttttagcgcaattaggggagtatttacgtctggggaataatcgtcaggcggtcacggattatatccgtcataactttggtcagacgccgctgaatcagctcagtccggagcaattaaaaaccattctcaccctgttgcaggaagggaagatggttattccgcaaccacagcagcgcgaggcgaccgaccgtcctttattaccggcggagcacaatgcgctaaaacagctggtgaccaaacttgcggcggcaacgggggaacccagcaaacagatctggcaaagcatgctggaactttccggggtgaaagatggcgagttaattccagcgaaactgtttaaccatctggtgacctggctacaggcgcgtcagacgctaagccagcaaaatacgccgacgctggaaagtctacagatgacgctaaaacaacctttagatgccagtgaactggcggcgttaagcgcatatatccagcaaaaatatggtctttctgcgcaaagtagcctttcttctgcccaggccgaggatattcttaatcagctttatcaacggcgggttaaagggattgatccgcgtgttatgcaaccgctgcttaatccttttccaccgatgatggacacgttgcaaaatatggcaacgcgtcccgcgctgtggatactgttagtcgcgattatcctgatgctggtctggctggttcgttaaccccgacgaaaactcagtatcgtgacaataatacccagcaccgcagagatcgccccggcaagaaatacgctagagtaaccaaacgtggtcgccagcattcccgccagcggcccggagacgccgagggcgatatcctgaaacgcggcgtaaccgcccagtgcggtgccgcgaacttgactggggacgcgtttaaccacctccacgcccagcgcaggaaagataaggctacatccggctccggttaacgccgcgcccgctaatgcgacccatgcacctggggcttgccagagcagcaacaagcccaccgtttctacaagcagagagacaatcgccactttcacgccgccaaaacggtccggcatccagccaaacatgacgcgcatcacgacaaatgcgccgccaaacgcggtaagagtaaagcccgccatcgcccatcctttgctggcaaagtagaggctaacgaaagtcccgataacagcaaaaccaacgccttgtagtgccagacctaaccctggtttccagataagcccgacaacgctccacaggcttggacgttctcccgccagggccggtactttgcgcactgtgccgttacaggcccacgccagtacgggtaataccattgtggtgatcgccagtgcggcaaaaccgtaatggctatgaatcaacaggccaagcggagcaccaacagcgagggcaccgtaaatcgccattccgttccaactcatcactttgccagagtgttttggccctacgatgcctagtccccaggtcagagcgcctgtcagtaactggctttcaccaaagccaagaatcaaacgcccgacgaccaacagagcaaatttgaacggtgcggagacaggcaaaatcgccgccagcagcaacgcgccgccagccagaccacaagctaacattccctgaagcgcgctacgttttgcaccatattgatcggccagtcgcccggcgtaaccacgcgtcagcaccgtagccagaaactgaatcccgacggcaatgccgaccatggtattgccatagcccagttcatgatgaacaaacagcgggataaccggcaacggcaaccctacggtcatgtaggtgagaaaaaccgcaaaagcgatgcggaagaggctaaaattggcagaagatcgtgtttcggtttggcttacagcagtcatgcattactccagaatgcagcgcaaggcgaggagtatccccgtctcatctctctggtttcagggttacggtgcgttggcaggatttaacgcgtacgtcttttcagaaggaaatcgacaaagcgggaagtttgcctggaactggcggcgattgtcaatgatgtgaaaaagggaaccatcaggttcccttttgcgttagtgccggaggccgcattggcgcgtaacgtcggatgcgacgctggcgcgtctactccgacctactgcgaattaatctttcagcttgcgcattaccagcgtggcgttggtgccgccgaagccgaagctgttagacataacggtggtcagttcgcgatcggtcgtttcggtcacgatgttcagacccgcagcctgctcgtccagctcttcaatgttgatgctcggggcgataaagccgtgttccagcatcagcagagagtagatagcttcctgtacgccagcagcgcccagagagtgaccggtcatggctttggttgcagaaatcgccgggctcttatcgccgaacacttcacggatagctgccagctctttcacgtcgccaaccggagtgctagtaccgtgggagttcaggtaatcgattggggtatcaacgccatgcatcgccatcttcatgcagcgtactgcgccttcgccagacggagcaaccatgtctgcaccatcagaggttgcgccgtagccaacgatttcagcatagatgtgagcaccacgcgccagcgcgtgttccagctcttcaaccactaccataccgccgccgccagcgataacgaaaccgtcacggtgagcgtcgtaagtacgggaggctttttccggggtgtcgttgtatttagtagacagcgcacccattgcgtcgaattcgcaagccatttcccagcacagctcttcgccgccgccagcaaacacgatgtcctgtttgcccagttggatctgctctactgcgttaccgatacagtgtgcggaagtcgcacacgcggagctgatggagtagttaacgccatgaattttaaacggggtggcgaggcaggcagaaacgccggatgccatcgctttggtgaccacatacgggccaaccgctttcaggccgcgcgggccgcgcattgcgtcagcgccgaacacctggaaacgcggggagccgccgccggaacctgcaatcaggccaacgcgcgggttattctggtaagcttccggagagaggcccgcatcagcgattgcctgctccatagaaaggaatgcataaatggatgcgtcgctcataaagcgcacaactttgcggtcaatgaggccagtggtatccagttttacgttgccccagacgtggctacgcatgccggaatccttcagctcctgagagaaagtgatcccactacgtccttcacgcagagatgccaggacttcctgctggttattaccgatgctggaaacaatgcccaggccagtaatcactgcacgtttcattcaatacctctgtaagtcgcacatagagtaagtttcgaatgcacaatagcgtacacttgtacgccgaacaagtccgatcagccatttaatagagaaatttgcgcagccttacacacatcgctaagatcgagccaccgcctgtaagacgagtaacttacgtgaaacactactccatacaacctgccaacctcgaatttaatgctgagggtacacctgtttcccgagattttgacgatgtctatttttccaacgataacgggctggaagagacgcgttatgtttttctgggaggcaaccaattagaggtacgctttcctgagcatccacatcctctgtttgtggtagcagagagcggcttcggcaccggattaaacttcctgacgctatggcaggcatttgatcagtttcgcgaagcgcatccgcaagcgcaattacaacgcttacatttcattagttttgagaaatttcccctcacccgtgcggatttagccttagcgcatcaacactggccggaactggctccgtgggcagaacaacttcaggcgcagtggccaatgcccttgcccggttgccatcgtttattgctcgatgaaggccgcgtgacgctggatttatggtttggcgatattaacgaactgaccagccaactggacgatagcctaaatcaaaaagtagatgcctggtttctggacggctttgcgccagcgaaaaacccggatatgtggacgcaaaatctgtttaacgccatggcaaggttggcgcgtccgggcggcacgctggcgacatttacgtctgccggttttgtccgccgcggtttgcaggacgccggattcacgatgcaaaaacgtaagggctttgggcgcaaacgggaaatgctttgcggggtgatggaacagacattaccgctcccctgctccgcgccgtggtttaaccgcacgggcagcagcaaacgggaagcggcgattatcggcggtggtattgccagcgcgttgttgagcctggcgctattacggcgcggctggcaggtaacgctttattgcgcggatgaggcccccgcactgggtgcttccggcaatcgccagggggcgctgtatccgttattaagcaaacacgatgaggcgctaaaccgctttttctctaatgcgtttacttttgctcgtcggttttacgaccaattacccgttaaatttgatcatgactggtgcggcgtcacgcagttaggctgggatgagaaaagccagcataaaatcgcacagatgttgagtatggatttacccgcagaactggctgtagccgttgaggcaaatgcggttgaacaaattacgggcgttgcgacaaattgcagcggcattacttatccgcaaggtggttggctgtgcccagcagaactgacccgtaatgtgctggaactggcgcaacagcagggtttgcagatttattatcaatatcagttacagaatttatcccgtaaggatgactgttggttgttgaattttgcaggagatcagcaagcaacacacagcgtagtggtactggcgaacgggcatcaaatcagccgattcagccaaacgagcactctcccggtgtatagcgttgccgggcaggtcagccatattccgacaacgccggaattggcagagctgaagcaggtgctgtgctatgacggttatctcacgccacaaaatccggcgaatcaacatcattgtattggtgccagttatcatcgcggcagcgaagatacggcgtacagtgaggacgatcagcagcagaatcgccagcggttgattgattgtttcccgcaggcacagtgggcaaaagaggttgatgtcagtgataaagaggcgcgctgcggtgtgcgttgtgccacccgcgatcatctgccaatggtaggcaatgttcccgattatgaggcaacactcgtggaatatgcgagcttggcggagcagaaagatgaggcggtaagcgcgccggtttttgacgatctctttatgtttgcggctttaggttctcgcggtttgtgttctgccccgctgtgtgccgagattctggcggcgcagatgagcgacgaaccgattccgatggatgccagtacgctggcggcgttaaacccgaatcggttatgggtgcggaaattgttgaagggtaaagcggttaaggcggggtaatctgctctcgcagtgtttgccggatgcggcgtgaacgccttatccgacctacgtgtgacgtgtaggcctgataagacgcgataagcgtcgcatcaggcatgctgctccagacgccgcaacttactgctgactcgcctgctgaaacaggttttcccacatatcggtcaccagcgcctggtcacgcgggctcaattcaccagcaccaatggctttttccagactctggctaacggtcgtatgcaccgcctgagcggagtggtcatcaccactttccagttctgcgatggctaatgtcaggtggccacgcaaatacccactggcaaacaactcatcatcactggcatggtcaaccataccgtcgattaatgccagaatgcgactttcaaactccgcgatcatcttctttcctcattgtaaaacgtggcgctggcttcagttgagcgcttccggccacgggaactgttccgccgtaagttccggcgtgtgataataattttgtagtgctttaatgaagcgtgccggacgttccggaatgccatttgtcagataatccatcacctgcgcatgtactcgccgttgaaacaccacacgatccggttcgaaatccccttccagattgtcgcaactgacgttaaacggatatcccgccgccacacagaacaaccagtcgagcgcctgcggcttcacttcaacatcttcaaactggctttgcgtttgggcatcgcgtccgtccgggcaataccagtagccgaaatcaaccagctcacggcgcgctttcccggcaatacaccagtggctaatctcatgaattgcgctggcataaaagccatgagcaaagacgattcggttatacggtacttccgcatcagcaggaagatagatcggttcgtcgtcgcctttaatcagacgggtattaaaatcatcggcaaagcagctattaaaaatttcaatcaactgctcgtagtggtgtgtactgttcattagttcatccccaaccagtggaggatctcctgtccgtggctgtcgtaaagtaatttggcactcatcaccgcgctgacgataacaatcatcgggcggatcagcttttgtcctttgctcaacaccagtcgactacccatgcgcgcgccgaggaactgccccaccagcatgacaaagcccgtcgcccaaatcactttgccgccgagaataaacagcagtaaaccgccgatgttactcgttgcgttgagtaatttggcgtgagccgtggctttggcgaggttaaatccgcacagcgtaacgaaggccagcgcgtaaaagctcccggcagccgggccaaagaatccatcataaaaaccgacgcagccaccggctattaacgcgaagggtaaaccgtacatccggcgctggcggtcttcttcacctagctttggcatcagcaagaaatagaggccgatacaaattaccagaatgggcaaaatctgccgtaagacatcagcctgaacgtattgcaccagcagtgcgccgctcatactgccgacaaaggtcatggcgatattgagtttctgatcgcttaaactaaccactttgcggcgaataaagtagatagtagcggaaatagagccgccgcaggcttgcagtttattggttgccagcgcattagcgggagacatccccgctgccatcaatgccggaatggtgagtaacccaccgccaccggcaatgctgtcgataaatcccgccagcatggcgacaaaaaagagaactcccagcaacagcggggaaaccataaacaggctattaaacgtttccattagatcacgtgctcatccagtagcgcctggcaggaaggcggcaacggaggcggtgtcttcttctcaggctttgttgttcccggttttggaggttcaaaccagctttgcagttctgccccgcaaccatcgccacttggcggtaaaggttgatcttcacactccagactatcggcagggcaacgtaatcgtacatgcatatgcgcgcgatgctggaaccagggtcgcactttgcgcaaccagtcgcgatcggtgcccgcatcaaggcaaagttgttgtttaatcgccggattaacaaaaatgcgcgtgacgtctttgtcctgggcggcgagtttgatcaagctgaaaatttctggcttccacagcgtggagacaacgtgtttaccgtcgcgggaaactaagtccagtgcttgcgggcgcaagagctgcgcggaggtccagcgagttttcggcagttgcagaaagatatcgacatccagtccggtctggtggctggcatgaccgccgttgaaacgcccaccagcgggcatccccatatcgccaatcagcaccgtacccatgcccagattgctcacctggctactcagacgctggataaacatcaccagatccgggtgaccgaaatagcgacgctgatcggtacgcatgacctgataatgttcggactgtatcggcagcgtgtcagcgccgacaatacagccattagaaaaactgcctatgctttgtgcgctacccggcacaggttgggttattttttgccacggcgtcgctgccaggctggcgctactggcaagcagagccagcagcgcaatcgcggttttattcattttttaccagcgtggaatatcagtcttcacatcggcattttgcgcccgttgccgtaacaggtgatccattaaaacgatcgccagcatcgcttctgcgatcggcactgcgcggatcccgacacagggatcgtgacggcctttggtgatcatctcaacttcttcgccaaagcggttaatggtacgacccggcacggtaatgctggaggtcggtttcagcgccatatgggcaatgatttgctgcccgctgctgataccgccgagaatgccgcccgcatggttgctctggaaaccgtctttggtgatttcatcgcggttctggctgccgcgcagcgccaccacgtcaaagccgtcgccaatttccacgcctttcaccgcgttgatgctcatcagcgcatgggcgatgtcagcatccaggcggtcaaagaccggctcgccaagtccggcaggaacgccactggcaacaacggtgactttagcgccgatggagtcgccctcttttttcagcgcacgcatcaactcgtctaacgcgtcgattttgtcggggtccgggcaaaaaaacggattttgctcgacctggctccagtctttgatatccagcggaatgtcgcccatctgggtcaggcagccacggatttcaataccaaatttctcggcgagatattttttggcaatagctcctgccgccacgcgcatggcggtttcgcgggcggaagaacgtccaccgccgcgataatcgcgcagaccgtatttttgttcgtaggtgtaatcggcatggcctggacggaaaacgtccttaatcgcactgtaatcctgagagcgctggtcagtgttttcgatcaacaagccaatgctggtgccggtagtaacgccttcaaaaacaccggagagaattttgacctgatccggctcgcggcgctgggtggtatagcggcttgtcccagggcgacgacggtcgaggtcatgttgcaggtccgcttccgtcagcggaatgcctggcggaacaccatcgacgatgcagccgagcgccagcccgtggctttcgccgaaggtggttacgcgaaagagttgtccaattgtgtttccagccatcacggctccgttattgttgtgtttgcgtgtttacttaatctttataaatcgcgaaatgttctcgtgcggcaataagctgctctttggtgagcataaacacaccatcgccgccgttatcaaactccagccaggtgaacggaacatccggatattgttccataagatgtaccatgctgttgccgacttcacaaatcaacacgccatcatcagcaaggtaatctgccgcgttaccgagaatgcgacgcgtcagtttcaggccgtcagtgccagatgccaggcccagttccggctcgtggcggtattcgtttggcaggtcggacatatcttccgcatcgacatacggcgggttagtgacaatcaggtcgtactgcactttcggcaagtcgcggaacagatcggaacgaatcggaatgacgttgtggatcagaccgtgttcttcgatgttctgttcagcaaccgccagcgcgtctggagagatatccaccgcgtcgacttctgcatccgggaaggcataagcacaggcaatggcgatgcagccgctaccagtacacatatctaaaatatgctgcggttgcttgctgataagtccggcaaatttattgttgatcagttcaccaatcgggctgcgcggcaccagcacgcgttcatcgacgtaaaattcatggccgcagaaccacgctttgttggtcaggtaagccaccggaatgcgttcattgacgcggcggatcacgcgttcaacaatacggtgtttttcgctggaggtcagacgcgcggtgcgcatatcttccggaatatccagcggcaggtagaggctaggcaacaccagctgtacggcttcatcccacgggttatcggtaccgtgaccgtaccagatatttgccgcgctgaagcggctcacgctccagcgcaacatgtcctgaatggtttgcagctcatttactgcttcatcaacgaaaattttatccacgtattcctccagggcatgatcgcaataatttcggcggctagtttgccatgaagatgacgataaatcagcattcacgcgcggtgagtgaggaaaaatacgtttaaaacgatcgattgcgctacgagtcgggtaaactgtaggaaaattagaaatagagacagataaatgaaaaagaaaacaacacttagcgaggaggaccaggctctgtttcgccagttgatggcggggactcgcaagattaagcaggacacgattgtccaccgaccgcagcgtaaaaaaatcagcgaagtgccggtgaaacgcttgatccaggagcaggctgatgccagccattatttctccgatgagtttcagccgttattaaataccgaaggtccggtgaaatatgttcgcccggatgtcagccattttgaggcgaagaaactgcgccgtggcgattatagcccggagttgtttttggatttacacggtctgacgcagctgcaggccaagcaggaactgggggcgttgattgccgcctgccgccgtgaacatgtgttttgcgcctgcgtgatgcatgggcacgggaagcatattttgaagcaacaaacaccgctgtggctggcacaacatccgcatgtgatggcctttcatcaggcaccaaaagagtatggcggtgatgcggcgttgttggtgttgattgaagtcgaagagtggctgccgccggagttgccctgaggagttgagcgcgttgcgccaggtacgggtaatggcaggggcgaatgcccctgcctggtgtatctaagggttacaactcattcagtatgtactggaaccggcaagtagaatcgattggctgcatactgctggtatcaacacgcacgaccatatcgtgtaactgtttgtccgttatagggtgtcgatttggcgtgacgctgacttccgccttgtcacatccgctcgcggtaaaagttatcatctgtgcaacccagcggcagtaaccacctgtttcattcatctgcgtactgtcgcacaacttcccatctttcatcaaatacgtactaagcgttttctcaaccacaccgcccgtgctctgcagggtgagcagtttactcttactgacataattctcattccaactaacgtcataaggttgaacagaaacggatggacaaatcgtgtcgtgactatcaggcccctgatacgtcacgccccctggagaggcttcagagtcattcataataaccaaccatggacaagaaaagtaagattcaatctctgcagagacaataacctcaaatgtataatacccgcagttccacccagacggtaatccaggacaacttgctttgttgatattttgatggtagccaatcagcttaacgctaggggcaggaggaggaccactccagctcacattttgcaatatttccccagtcatgagccattgactacttttatattcaccaacgtacactgcggatggcatcattatttttaaattaaaagtcgcaatattacggctatcaccgttgtaaccgtagtaaacgtcaacgctatgcccggcagccatagcttctgtagtagcaataagcatgaccagagcgaacaaccatcgtagtattttcattttaaatatactcaaatgtcgcagttaaagaggcggtaaattcaccgatcgtcacatcacggccgcttttcgcctgtagccaggctctgaaattgatatcgttattgccattggttagcgcaaaggtcgccccatttgtattgttgatggcaacctgcattccgtcggttttttccatgccaattcccactccctgagcggtactactcgtatccagtgccagaaaaccgggttgttcgctgtcttctacccccgtgagcgtgacttttacgttgtatcccgccggccctttgcaatctttcagcttaaagactacgggtacacgagcggactggcctgcaacgttcaaatcctgacgactgaccgtgggaaagcgcacctctgccagatattggccatccaccaccagcgcacaggatttacttaataaattaccggagaaatgcagattattatctgccgcgaataacgtgctactcattgccaatatcagccccgctaacaggacgtaaccaccggactgaatcatacttttattcattgataatccacccgtaatgttgcgtaagcgctaaaattcgtatcgcttaacacagcatcactcgcttttaccggtacggcctccagcttcggcttttgcgtaaaatcagtggcgttgatagcaagcggagtattgagtttaaaacgctgaccatcgtgctgaagctcgataccaaaaccgggtacatcagtttcaattgctgcatcattaaaactggtttgtgtaccagtccaggtgagggtcatctcccaatctggatgacgggtcgtgctgtcacaagtgagttcatatggcacctctttacgaccatagttgccgttgatgtcgtcgataatgagatcgcgaaattcgacttcaatggttttaccaccgctgatgctacaggttggcggactcaataatgtcccgtgaaaggtgatgtcttcatcagcagcatgagctatggcgctactgacacaaagcagggttaagaaagtctttctcattgatagtccaccaccatggtcaaactggcgttaaactcgcccgcagcaagttgcgccccgcttgccttcacaggtacagccttcaactgtggctggttattgatattaaatggcgtccagctattttcaccgacggcaaacaaactgttatcggcgctattttctatccgaatgcccagcccggtgatattggtactgagtaccgtttcgccgttaatcgtactggtattgcccttaagttgcatccgcaagtcgttagcaagactgtttgtgcagttcaacgtgtatttcgcatcttgccgataattggtgccatcaacgttatcagcaatcatattgccgaactctacctggctgcccttgatactacagggtggcggagcatcgaccaacacgcgcagaattaaatccacgggtttactaccagccatagcagataaactacagacactgcataccagcagccctgcgcccactacaaacttttgactcataactccccccgtcatcagcctttgcggctctgctcttcatccacctggcagctgttgccattgcactggaagaacagcggcatccgtgcgccaaagtcgttgacgtaagtcagcaccggtacgctatccattttcacattcagcggtaccgtggttttcggctcaatgaccagagggctgaaccctgcagctggattaccgtttttctgcgcactggcgttgctgataatcacgtagtacggcgttgggttattgacggtaaatgcctgaccgctgcgggtgagcgtcaccttgtgctgccacggacttttcatactgaccttttccagcgcctttggtcgccagaacaacttgatacgcgtttgcagcgcgatttgcagggtattgggtttgttactttttggcgggatctcgcgcacgttaaagtagaacatgctttcacgatcggctggcaatttgttgatatccggcattccctgcacttttacctgcccgttcatcatactatcgatgcgttgcactggcggcagcacagttaacgggctggtgatcttgttacccttttcatcttcaatccagctttgagccagataagggagtttcggatcgttattacgcagcgtcacgctgatacttttgtcgctttcattaaatatcaaacgggtacgatctggcgttacagacgccagggcagacaaactggtagcgctaagcagtaacgccagcgtcatagcacccaatttggcagagcaaagtaaatcagacatggatcattccttaatcacgttattggttagcactaacagaaacagggggatcggtgggtgtcacctgttgcgtctgctcctgaatgacaggctttatgtcatcaggaacaaccggcgcgacgttgcctttatgctggcatggcagtaacaagccgttaaacagatcggcaggcagcgggtccggcaggttgatatcgcaatgcgcaacaccactccagaacacactcatatgttcgccaggtttcaccccagccagatagacactaccgtcatcatcgacaaggcccactgtctgctcgttatcattttttacttctgcgccaaacggtggatggctgccatcttgtaaacgcagcaccgccatcgctttttgaccactgatgacggcaaatttgcggtagccaatggctccttcagttagcgtggcttgcaccacgctctgggttgcttcggcgttttccggcaatttgttgaggtcgatatacgcctgattgcgataataattgttaacgtcagaaacgacggctttaccaaacatattggtataaacagcagccccgttaccttccaccggaacatcggcaacgccatcggcatcaatcagcaggcgtgtcccgcccatattctgggtacggtgaagtgcgccgccgtgggtagtaagcgttgcgccgccctgtaagctcaagcccgcagaggtgtattgcccttcatggtagttcgcactgaggtcaacctgcgccaggctaccatcatggctgtagtagccatcaacgctggtgtgtttgtcactggtgccgatgttcaactgatagtgagtcgcgtcatcgacacggctaaaataaccgacctggctgctgtccgtcccactgccatagttgccgttatagctaacggtactgttgtcgccccacggcatactgagcgaaatttacatgcccttatccgcccggttgtcatactcgtagcggtagccagtcagggaaacgctcatattacgaatgctgcccatattgaaatagtgggagagcatgatgttgtagtttgtctgctcctcacgatcccagtaggtatggcgggtatagttgagataaacgctaacacccgcatcgcggaagttctggttataagtggcggtgtacatctctttgtcgttgcccgtacggaccatttcgctgtcactggcatccagatactcgctcatggtcataaagttctcttcgctgaagcgatatccagcgaaagtgacgcggctgttgagctggtcaaagtctttggaataactcacacggaaggagttaccgtccaggctacctttgccataagcggtgtctttatccagtttggtatggctatgagtaacatcaaacgcgaccgcgccgaaggtagacaaatcgcgaccgacgcccagcgccgcagactgatagttttcatcacccagcgcaccgccatataagctccagccgttagcgatgccccaggaggcttcagcaccagagaaaaatcccccctcgacatggtggccccactcttgcggacgtcccatcatgatcttatagcgaacctggcctgggcgagtgaggtatggcatgctggcggtgctgatgtcatattcctgcacctggccgttctgttcttcaatgcgaatatgcaacgtaccggagacggaatcaccaagatcctgaatacgaaacggtccagccggaacctgcgtttcgtaaatcacacgccccatctggctgacggtcacttttgctgtggtgtgtgccacgccggaaatgtctggcgcgtagccgcgcagattgggaggcaacatttgatcgtcagtgctgacactgccaccaacataattaaaaccgtcgaaaatatcggaattgaggtaatcttcgcccagcgccagtttggcttttaaactcggtaacgcccgccaggcataatagcgactccactcccattttttttgtgtgtcatcgccgccaaattcatcgtcatcatcattactgcgcgtatgttgatagttggtctgccagtcagcgcgcatacgccatggccccaggttaaccccgaccgtcccgttgccgctgatctcgttactgtcatcgccgccattttcttcgtgtcgtgtttgcgcagtgatgctgtagtccgcaatgatcccggagatgccatcatcccaacgagaaggtggatcccagtcgggccaggtatattcgaggtaagcctgcggtagactaatgactaatgcggactggcttaaatcagccttaatttccacgccttccagttgaccgggcttcaggcatttaccatcgtggctccattgcagatttttcgccacgtcttcttttaaaccaaactgcgccaccagttccggtgtcagacaagcatagcttttgctaacgtcatcttcaccagcataccagtaaatatcgtactcttccgccaatggctgtttatttagttgaacctgtaaattgtattttccgggctcaacatacccctggctggaaaaacgcttcagatcaatttttgtgtcgccttttaattccagaaaacgggaatcaaactgaatgtcgtcttcagcccagacactgctataactcccactcattgccagcgcaatgcaccacggaagaatccgtaatcgaaaaagagaatggtcaggcatacacgtttttatccgtttttattcttgttcggtcaaaatccatttaaataccccatagcagtgtcgctatgggggtatgccttacaggtaagtaatctggaaggtggtatttgcttcgaaattacccagatctggcgcatcagctgcgccgaccagccaggctttaaagttcagagtctgcttcgctttgcctttattagtggcagtatctttcacgattttctggtcaatacccatgccgcttttgtaagaggtacccagagagtcaccgatcgccaggctaacattgttaaatgccgcaccggtatcggtattgaaaatggtgtaataattgccgctatttgcagaagaaacggtaccagtaaaggtagtggtcattgtttcctgagtatcaaatacgcaatcttgcaggcgaatctggaaatttttcggcgtggtggtgccgttatttttcagtttttcggcaccgatatcacccatatcaacttccagtttgtgatcgtccggaacgatagaacacacactgtcttcaatggtgccgtaaaaacgtgcagtaccgttgttacccgcagcgattgttgccgtagaggtgaacgcgcccatcaccattgccgcagcaatagctgttttaacaaacttactcattatttgtccttaaactataaataattaaaatataaacattgcaatacattgattcagtcaatagccaatgtttatacccagccattgaatacggcatgcgatccaaaaaaacaggtcgtaaaaaatgtattcgttggtgtggggtcgaatagtgatgttttcactcccctgattcaatttaattttactaatgagtaaatgtagatttaattaatatattgataggggaaagattatcttaaggatcttctaaaaaaacacgaaatatatatttagaaaaaacaggaagcatatcaacaatgaatgccaatagcttaaaaaacaaacaatgaacatataatgcgattggcattaacccgcttttgtcgatataatatataaacactatagccagaatttaatcaagtttcaattacgtcctgcctgattattcaactctattttctccattatctgtattaataaatgataatgagtgtcaaacagacattattcatttcaacatgtaactttgggcaaaatcaagatacgcgcagaagaatactttccgaatgaaagttaaaggtgttttatttatagatggggagagtcttcgatagtagtgaggttgacagatatccgctgcctgatgagcaattatgcccaatgaatctacctcattgggcataatttggaactcatcagatagcttttgccatcttcagattacacgggctcatctgccagttgaatgtgccgtttccgctttcatcaagcgttacgctggcaatggcgctggtggtaaacataggcggcgtttcgcccggacataactcggcaaccagatacccgactaacggtaagtgagagatcaccagtacgctagcaacaccttcattggtcaacgcctgcaaataggcactgaccagaccaacatcgccgcagggcgttaactccggcagaacttctgcactggaaggcaggttcagacaatcccctacttcttccagtgtttgctcggctcgcaggaacgggctcaccagaacgcgttcgatttccactttttgacctttcagccagttcgccatcaggcgagattcgtcacaaccattagtggtcagaggacgaacggaatcactggcggcatcgagggctgcgtcgccgtgacgcatgataaaaacttgcatattgcaccgcttttgttaaccagattcgcccgttttctttcatctgaaaccagagaaagaaaacggtggccggcattgtgccttatccattcaccgaatgaaacgctgttttttacctcaatggcgtaagtatagtcaatatgcgtttacattttgaccaacactccgccattcagcgcggattcatatagctttgaccttcttattgcaggtcagttgcagttgttttccaaaaactttccccacgcgcgcccatctcgaccaaacgctcgcaaggggtaaaacgggaaccatactgcgtggcaagtcgttgcattattgcaaccacttcgcccgcgccgagagaatcgatatagcggaacggtccaccgagaaatggcggaaaaccaatgccaaataccgcgccaatatccccgtcacgcacgctacggataacctgctcatcaacacaacgtactgcttcattcagcatcaacatcacacaccgttcagcaacctgcggtgcggagattcgcccctgcccttgtgtgccaatcagcgggtaaatggcgggatcgacctgttttttgcttttacgccctttctgaccataaagatagaaaccccggccattttttctgcctttgcgatcgtcgttcaaaatactagaaacaacatttgcaggcgcgctaaaacgttctccataagcggcttccagtacaggaataattttagtcccggtgtcgattcctacctcatccaaaagttggattgggcctaccggaaaaccaaatttcactagcgcggcatcaatgtgctctacccgttcaccttgggtcaacatgcggatagcttcattaatgtaaggcgctaagatgcgattgacgtaaaaaccggctttgtcacgcacgacaattggcgttttaccctgttttttcgccagttttactgtggtagcgatggtttgcgcgcttgtccccgcatgaggaataatctccaccagcggcattttttccaccggactgaagaaatgcaggccgataacttgctcaggtcgcgtggcgtgagcggcgatatcaccaatcggtaaagaactcgtattgctagcaaagatggtatgagcggcgcaattttgctcaacttccgccaccatctgttgtttcaattcgagattttcaaacaccgcttcaataatcagatcgcgatgggcaaagccgcgatagtccgtcgttccggagattaatgccagctgtttgtcacgttcgctggctttgagatgacgacggcgaactttgccctccagctgatcccaactgtacttcagcgcatgatttatgccctgcgggttgatatctttaattctgaccggaatccccgctttacaagcagtgacataagcaataccgccgcccatcaagccaccacctaaaatccccacgctgtttaatggcgcaggcggcgcatcactgccgggatctttcttcacgtccgtactggcaaaaaagatactacgcagcgcctggctttgtggcgtcatcgccagttcgccaaacgcccgagcttcggcgtcataaccgctgctggtgccctgcgctaatcccgtttcaacaacctccaggatgcgttctgtcgccggataattgccttgagttttgtgttctgttttcttgccgaccattttgaacagcagcgcacgacctaacggccccgccagaatacgctcgcgtacaggtagagggcgggaagatgggcgctccttctttgccagctcaacagcggcttccagcagaatggagtgcggaacaacgtcatccaccagccccagctttaatgcctgtttcgcccgaagttgttttccggtgaggatcatctctaatgctgtgctgacgcctatcagacgcggtaaacgctgggtgccgccactaccgggtaacaatccaagttgtacttcaggcaaaccgagcaccgttttaggatcgtcagtacaaacgcgaccgtggcacgccagcgccaactccagcccaccacccaggcaagcgccatgaatagccgcgataacctgaatgggcaaagcatgaatctccgccatcaactgttggccctgccgcgccagagcttccgcttcttgcgccgttttgcagttgccgatcatgttgatgtctgcgccagcaatgaagttgtccggtttagcggagacaaacaccacgcctcgcaactctttgttttcacggagttgcttaataatggcgcgcacctggctggcaaactccgccttcagggtattcattttctcacccggtacgtcgatggtgataacggcaatgttgtccagacgaacattaagggtaaacgcacttgtcatttccattattccgcctccagaaccattgccgcgccaagcccaccggcagcacaggcggtaactaaaccaaatccaccgccgcgacggcgaagttcatgcaatgtctgggtaatcatccgcgcgccggtcgccgcgaagggatgcccgtaagcaatgctaccgccaagcacgttaaatttgctatcgtccacttcgccagtggcatgtgcacgccccagtgcttcacgagcaaaacgttcactacccagcaactgaatattcgccagcgtctgagctgcaaaggcttcgtgcatatcgatcaatgtcagatcgctcatcgtcaaaccggcacgctccagcgccagcggtgtactccaggctggaccgagcaacatgtcctgccagacatcaatcgcagtaaatgcgtagctgcgcagataccccagcggcaccagccctaattctttcgcccgggattcagtcatcaggatcaccgctgccgcgccatcggtcagcggcgtactgtttgccgccgttaccgttccgtgtttgcgatcaaacgccgggcgcagctttgcgtaatcggcaaggctggaattaccgcgaatattgttgtcttcgacaagcggttgtttataaggagggataaaggcagtcatcacctcttctttgagttttccgtcactccatgcctgagcggcacgctgatggctacggtgcgctaatgcatcttgctgttctcgggtgatgccgtaggttttcgccatttgctctgcggtgtcgcccatccgcaagccggtagaatattctgctaccgcaggtggtacgggcattaagtcgcgcaaacgcaggcgagagaagagtttcagtcgctggctcatggtacgagctttgttgacatcaaccagcacgcgcgccagttttttactgacgccaattggcaatacgctagaggaatctgccccaccggcaatccccgctcgaatagttcccgccatcaggctttctgcgacgtttgcaactgcctggaaactggtagcgcaagcgcggctgacgctgtaagcatcggtatgtacattcattcccgtaccgagaacaatttcacgcgcaatgttgggggcttcaggcatttgtacgacctgaccaaagaccagttgttcaatcacttcggcggggatctcgctgcgtgccagcagttcgcctaccaccatcttccctaaatcaaccgcgggaatgccatgaaaagccgtcgcctgacgggcaaaaggcgtacgtaaaccgctaacaatggcgatacgatcgccctggcgggtaaccagcggtaaaacctgacccataacactcccctgtaaaaaaataaataaagtggtctgacctgatcatagtcttaaccatttttttacatttagccaagtggagaaaagggaaagtgggagctatgacacagagagaaaagaagaagagaaaagaaaacgcccctgccagcaactgacaggggcgtacgtacccgagaggaattaacgcagacccagctggaaaatcagcatttcagcttcgcaggcaaaagtgaaatcgatatccaggcgcacaccgtcagactcttcagtgaaagtcggggtgattttgcaaggttcagattccacgctacgggctttttcagtcagcgccgccagcgtttgctctgcttctgcgcggtttgcaaacacgcggctgtaagacgcggtgcagtcggagttgtccataatggtgccaacatccatacagcagcaaaccggggtttcatcagcactacatttactcatcgttgatttcctctgtatgtgcacccaaggtgccagataaacgttgtggatattttacgcttccggaaagtgctgctccagttgttaattctgcaaaatcggataagtgaccgaaatcacacttaaaaatgatctaaaacaaaattcacccgaatccatgagtgcgccacctccaaattttgccagctggatcgcgtttcttagatcatatttgaaaaaagatagaaacatacttgcaacattccagctggtccgacctatactctcgccactggtctgatttctaagatgtacctcagaccctacacttcgcgctcctgttacagcacgtaacatagtttgtataaaaataaatcattgaggttatggtcatgagccagaaaaccctgtttacaaagtctgctctcgcagtcgcagtggcacttatctccacccaggcctggagcgcaggctttcagttaaacgaattttcttcctctggcctgggccgggcttatagtggggaaggcgcaattgccgatgatgcaggtaacgtcagccgtaaccccgcattgattactatgtttgaccgcccgacattttctgcgggtgcggtttatattgacccggatgtaaatatcagcggaacgtctccatctggtcgtagcctgaaagccgataacatcgcgcctacggcatgggttccgaacatgcactttgttgcaccgattaacgaccaatttggttggggcgcttctattacctctaactatggtctggctacagagtttaacgatacttatgcaggcggctctgtcgggggtacaaccgaccttgaaaccatgaacctgaacttaagcggtgcgtatcgcttaaataatgcatggagctttggtcttggtttcaacgccgtctacgctcgcgcgaaaattgaacgtttcgcaggcgatctggggcagttggttgctggccaaattatgcaatctcctgctggccaaactcagcaagggcaagcattggcagctaccgccaacggtattgacagtaataccaaaatcgctcatctgaacggtaaccagtggggctttggctggaacgccggaatcctgtatgaactggataaaaataaccgctatgcactgacctaccgttctgaagtgaaaattgacttcaaaggtaactacagcagcgatcttaatcgtgcgtttaataactacggtttgccaattcctaccgcgacaggtggcgcaacgcaaagcggttatctgacgctgaacctgcctgaaatgtgggaagtgagtggttataaccgtgttgatccacagtgggcgattcactatagcctggcttacaccagctggagtcagttccagcagctgaaagcgaccagtaccagtggcgacacgctgttccagaaacatgaaggctttaaagatgcttaccgcatcgcgttgggtaccacttattactacgatgataactggaccttccgtaccggtatcgcctttgatgacagcccagttcctgcacagaatcgttctatctccattccggaccaggaccgtttctggctgagtgcaggtacgacttacgcatttaataaagatgctagtgtcgacgttggtgtttcttatatgcacggtcagagcgtgaaaattaacgaaggcccataccagttcgagtctgaaggtaaagcctggctgttcggtactaactttaactacgcgttctgataacgcgttcgcctggataaagtcacctgcatagcaggtgactttaactcccccacttcaccgaaagtagtgtcctcattgcttacctcctgagttttgcaaacagcctgttggcagcttgccctttcaaatcaataagcggtatccacagacaaacctgaagggaaaggcatattttcaggcgttctgctcgtccttctcaaagagtttacttttctgcatttccaggatactccccccccctggctattgtgcgctcatacactcaaattaaagataggttctaaataaatgagcgttttttgatagtctatttcattaggtaatatatatttgtaacaaatcaatcaaaatggaataaaatcatgctaccatctattagtatcaacaataccagcgcagcttacccagaatccatcaatgaaaataacaatgatgaagttaatggattagtacaagagttcaaaaacctttttaatggtaaggaaggaataagcacctgtattaaacatctacttgagcttataaaaaacgccatacgagtaaacgacgatccttatagatttaatattaataattccagtgttacttatattgatattgactccaatgatacagaccatattactattggtatcgacaaccaagaaccaatagaattacctgcgaactataaagacaaagaactcgtccgtactatcattaatgacaacatagttgagaagactcatgatatcaataacaaggaaatgatcttcagcgcattaaaagaaatatatgatggagatcctggttttatcttcgataagataagtcacaaactcagacatacggtaacggaatttgatgagagcgggaaaagcgaaccaacggacttatttacctggtacggtaaagataaaaaaggcgactctctcgctattgtaattaaaaataaaaacggaaatgattacttatctctcggttactacgatcaggacgactaccacattcaaagaggaattcgtattaatggtgatagtctcacccaatattgtagtgaaaacgccaggagtgctagtgcgtggtttgaaagcagtaaagctatcatggcagaaagttttgcaactggttccgatcatcaggttgtaaacgagctcaacggggaaagactgagagaaccaaacgacgtttttaaacgttatggtcgagcaataagatatgattttcaagtggacgatgcaaaatataaatgcgaccatctaaaagaaatagtttctactttagtcggtaacaaaattaacgttggccattctcaaaaaatatataagcattttaaggatctcgaaggtaaaattgaagaaaggcttcaaaatcgccaggctgaatatcaaaatgaaattaatcaaccatctgcgccaggtgttaattttgatgatatttaaaattatttttccagttttttgatttttcaacagctgaatatcggaaatagtcagtgacgaacatcagtatttttacataattacgtctaggtcattgtcggtttatctccttttacttgtggtaattgagggataacaacaaaaaaggtgagttttgcgactcaccttttttatttgtttcttattcagaatcaatatcttttaaatcatcctgaatcgcttgtgcgttcggattttcctgcggtttgagttcgccgccattagcgatgaaatcatgacgctggaagtacgcttcgcgcaccataatataaggatcggagctctgacgcagcagaccatcggaatccagcagctgagcgcgggtttcgatcccttcaagcgtccatttacccacagacatcggccaggtcagccaggaaagaaccgggtaaaaaccatccgccatatcaccaccgtcatcacgcagcgtgaagctaccgtagaacggtaactgaacgtaaggcccataacccacgccataatgaccaagcgtactaccgaagcggtgaggttcagtccgttgcagtttcgggttcgccatccctgcaacatcaataaaaccgcccatccccaaaatggtgttcaggaaaaagcgggtaaagtggaccatcccctgataagggtcgccctgcaagaagtagttaaccatcaccgcaggttcttcaaggttgccagtaaagttgctcaaaccgttacgcgccggttgcggaacataatcacgccaggcgacagcgaccggtcgaacaatatacgggtctaatacattgaagttgaagttgtacatggtgcggttgaacccttctaacgggtcagaacgcccttgctgatctgtaccggaactcgcacaccccaccagaagcgtagttcccagagcaagcgcgctcaggcgaagcttcataaatgtctccctgtttttttatggcttatgcagtttgccatccatgacggaacgataccgtatccgcctgtttaggtgtgggcgattgtaacagcacgtcaactgatgtccagacgccctgatttgctgatttgatcatagcctggtaatcgccgccctgtaggctacttgattctatagaaacagaaaaaggcaaacgcagccttttctacattttcagagtaactcccgtcagttgcgagcaaaaaagccgctacgctttagctatacgtgctaattcaagagaagagaccatggacaacgacaaaattgatcaacacagcgacgaaattgaagttgagagcgaagaaaaagagcgcggcaaaaaaatagaaatagatgaagaccgactcccctcccgggcgatggcaattcatgagcatatccgccaggatggtgaaaaagagctggaacgcgacgcaatggcgctactgtggagtgccattgcggcgggtctgagcatgggcgctagcttactggcaaaagggatatttcaagtcgaactggaaggtgtgccgggcagcttcttgctggagaatctcggttatacctttggttttattatcgtcattatggcccgccagcaattatttaccgaaaataccgtgactgcggtactacccgtcatgcaaaaaccgacaatgagcaacgtcggcttacttatacggttatggggcgtcgtgctgctgggtaatattctcgggacaggtattgcggcgtgggcatttgaatatatgcctatcttcaatgaagaaactcgcgatgcatttgtcaaaatcggcatggatgtgatgaagaacacccccagcgagatgtttgccaacgcgatcatttccggctggctgatcgccactatggtttggatgtttcctgcagcgggtgcggcaaagattgtggtgattatattgatgacctggcttattgccctgggtgacaccacccatatcgtggtcggttctgttgaaatcctctatctggtgtttaacggtacgctgcactggagcgatttcatctggcccttcgcactacctactttagcggggaacatctgcggcggcacctttatcttcgcgttaatgagtcatgcacagattcgtaacgacatgagcaataagcgtaaagcagaagcacgccaaaaagcagaacgtgcggaaaacattaagaaaaattataaaaacccggcataaatggcgagggtttaagcaatcgagcggcagcgtacttaccccgcactccattagcgggtatactcatgccgcattgtcctcttagttaaatggatataacgagcccctcctaagggctaattgcaggttcgattcctgcaggggacaccatttatcagttcgctcccatccgtaccagtccgcaaaatcccctgaatatcaagcattccgtagatttacagttcgtcatggttcgcttcagatcgttgacagccgcactccatgacgggtaaaaagtggataaaataattttacccaccggatttttaccctagagccatacagcctcacactcgatgaggcctgtcagtttcttaaaatatcctgatctaccatcgccgtcatagagcgtatttttattacctgatttgcaggttcgattccctattcggagatagcactcatgcaacacgaactacagcctgatagtctggttgatttgaaattcatcatggctgatactggctttggtaaaaccttcatctatgaccggattaagagtggcgacctgccaaaagccaaagttatccacgggcgagcaagatggttatatcgtgaccattgtgaattcaaaaataagctcttaagccgcgccaatgggtaaaatagcgggtaaaatatttctcacatctaaaaaacaccattccaatcaatcccctgctgcttcaagtagatgtctgcaggggacaccatccttgtgtttatccctaaaaccacataaaaaccgtaaattaaattcgaactagcaggccgaataaggcacaccaggaactcgtggttttattcattaactagtggtttttacctgttctcttagccagataataaacgcttcaatttttggccactgcctgcccggtaatgtggtgatgtaataatgctgatggcatttcaccgtcatatcgccaaacggcgcgacgagctcaccactggcaagccttttttgtaccaggcgttttcttcccatcgccaccccaatatgattcatcgcggcaataacagctaaatcagaacgatcaaagccaattccagaagatgtcggcaaattaaccgcataatgttgcgcccaactatgccattcatccgtaccggagtcgttgctccatgcctgtctgtcatggagcaacgtacagtgacacaggttaattaccgtgttggttaaagcatgtctttgagcgtattccgggctacatactggcaggatttcttcatccatcagaaagtgatgagtgagttgcgcactcggcgcatcatcaaagtagatcgccaaatcgattccggcacgttgcagattgacgttgtcattaccagtgagcacggtgaggctaatagacggataccggcgtgtaaagtcacctaatgcgggcaccaaccagcattgggcgatagagggccgggaatacagagttaacgttccgcttaactcctgatttttgatatcaagaatttcctggttcagggtatccaggctgctttttagcgcccaataaacacgtttcccctcgtgcgttaattccactttgcgatgggaacgaacaaacaactgaatgcccaattcttcttccagctgattgatacggtgacttaccgcactggggctcaggctcaattcctctgccgccagggcgaaggactgatgcctggcagccacttcaaaagtatgcattttacttaattgccagccgttaagcagccgatttcttatttcacgaaggggttccataatcacctcatttttcgcttaagtgtaaaaaaatagcggcaaaatttcagctatgagatgagctaaagtgaaccatatctcaattcaccttcatttttagatgtaaatcactccattgatgcaatttacctcatgtgaaaggcaaattttatcgtttgtcagcctgcgttgtttttttgtccaatatcatcaggttaatcacaggggaaggtgagatatgcactctcaaatctgggttgtgagcacgctgcttatcagcatcgtgttaattgtactgaccatcgtgaagttcaaattccacccgtttctggcgctgttgctggccagcttcttcgtgggaacgatgatgggcatggggccactggatatggtaaatgctattgaaagtggaattggcggaacgctggggttcctcgcagcggttatcggccttggcacgatactgggaaaaatgatggaagtatccggggccgcagaaagaattggtctgacacttcaacgctgccgctggcttagtgttgatgtcattatggtgctggttggcctgatttgtggcatcacgctgtttgttgaagtgggcgtcgtgctattgattcctctggcttttagtattgccaaaaaaaccaataccagtttattaaagcttgccattccgctatgtaccgcattgatggcagtgcactgcgtggttcctccacatccggctgctttatatgttgccaataagctgggcgcagatatcggtagcgtgatcgtctacggtttgctggttgggctgatggcaagtctgatcggtggcccacttttccttaaatttctgggtcaacgactgccctttaaacctgtacccacagagtttgcagatctcaaagttcgcgatgaaaaaacactaccgagtttaggcgcaacgttattcaccatactgctacccattgcgctgatgttggttaaaacgattgccgaattgaatatggcgcgtgagagtggtttgtatatcttggttgagtttattggcaaccctatcactgccatgtttatcgccgtgtttgtcgcctattatgtgttgggtatacgccagcatatgagcatggggacgatgctcacacatacggaaaatggcttcggttctattgctaatattttgctgattatcggggccggaggcgcattcaacgccattttaaaaagcagcagtctcgctgatacgctggcagttattctctccaatatgcatatgcacccgattcttctggcctggttagtggctcttattctgcatgcggcagtgggctccgctaccgtggcaatgatgggggcaacggcaattgttgcacccatgctgccgctgtatcccgacatcagcccggaaattattgcgattgctatcggtagtggtgcaattggctgcactatcgttacggacagccttttctggctagtgaagcaatattgcggcgctacgctcaatgaaacatttaaatactatacgacagcgacatttatcgctagtgtcgtcgctctggcgggcacattcctgctgagttttatcatctaagcgcaaagagacgtactatggaaaacgctaaaatgaacagcctcatcgcccagtatccgttggtaaaggatctggttgctcttaaagaaaccacctggtttaatcctggcacgaccagtttggctgaaggtttaccttatgttggcctgaccgaacaggatgttcaggacgcccatgcgcgcttatcccgttttgcaccctatctggcaaaagcatttcctgaaactgctgccactggggggattattgaaagtgaactggttgccattccagctatgcaaaaacggctggaaaaagaatatcagcaaccgatcagcgggcaactgttactgaaaaaagatagccatttgcccatttccggctccataaaagcacgcggcgggatttatgaagtcctggcacacgcagaaaaactggctctggaagcggggttgctgacgcttgatgatgactacagcaaactgctttctccggagtttaaacagttctttagccaatacagcattgctgtgggcagtaccggaaatctggggttaagtatcggcattatgagcgcccgcattggctttaaggtgacagttcatatgtctgctgatgcccgggcatggaaaaaagcgaaactgcgcagccatggcgttacggtcgtggaatatgagcaagattatggtgttgccgtcgaggaaggacgtaaagcagcgcagtctgacccgaactgtttctttattgatgacgaaaattcccgcacgttgttccttgggtattccgtcgctggccagcgtcttaaagcgcaatttgcccagcaaggccgtatcgtcgatgctgataaccctctgtttgtctatctgccgtgtggtgttggcggtggtcctggtggcgtcgcattcgggcttaaactggcgtttggcgatcatgttcactgcttttttgccgaaccaacgcactccccttgtatgttgttaggcgtccatacaggattacacgatcagatttctgttcaggatattggtatcgacaaccttaccgcagcggatggccttgcagttggtcgcgcaagtggctttgtcgggcgggcaatggagcgtctgctggatggcttctatacccttagcgatcaaaccatgtatgacatgcttggctggctggcgcaggaagaaggtattcgtcttgaacctagcgcactggcgggtatggccggacctcagcgcgtgtgtgcaagtgtaagttaccaacagatgcacggtttcagcgcagaacaactgcgtaataccactcatctggtgtgggcgacgggaggtggaatggtgccggaagaagagatgaatcaatatctggcaaaaggccgttaataacgtttcaacgcagcatcgcaatcctttccctgggtgagcgatgctgccgatggcgcagacttaagatccccggtcttacccgctataaccccctccttttatcatcacccaacgcctttcgctgtaaacggcggtttcgcaaaccaaaccaaaaccgtaagtaagataaaagcaatagccgccatacggaaaatctcatttgcagaaatagaaagactctgctgggttatttcattattaatttcattaagaactccactaaggctaccataatatttatccataatttgactgctactattaaacacggggttaaattgatcgatggttgctgtcaactgactatggtgtaagctttcgcgtcgtccccacagcgtcattgtcaagctcgtaccaacacttccactcaaggtacgaaaaaaattactcatactgctggcattggcaaatttattatctggcaagccactaaagctaatcgttgttaagggtaaaaagaaacaggcaacggcgaatccctgaaaaaactgcggcaaaatgatgcctgtaaaatcaatcgttggcataaatgtcacagaacgccagtaatagcaaaccgcatacatcaaaaaactaaatgtcactaacaaccgcatgtctattttgttgccataacgtcctatcaaaggactaattaatagtggcatgatgccgatgggcgcataagcaagtccggcccatatcgcattataccccatcgtttcctggagtaactgcggcataaggacgatcgctccagagtaaaataaatacgcgcatgtgatactcacaataccaatggtgaagttacgggacttaaacaaactgagatcaagaatcgggttctcactggtgctctcccaaatgactaaagagatcagagaaataacacttactactgttaatattattattgtactgctgttgaaccaatccagatcgcgccctttatcaagcataatttgcaagccaccaacaccgagcactaacagggtcagtcctggtagattcattttgaccggactagtctcagtttctcttcctttaagtaaggttaagcataatgtcaggacgataatccccatagggacattgattaaaaatatccaaccccagctaaagttatcacaaatataaccgcccaatatcggcccacatatcggagcgataatcacggtcatactccataatgccagagcaaatgttcttttttctggcggataattccttaataataaactctgactcagtggaattaacggccccgccattaacccctgaacgactctaaaaaatatcagcacatcaagattggtgcttaggctacacattaaactagacaggctaaaaaaagtgacactaagtaaaaataatcttaattcgcctattctttgtgccaacctgccagtaacagggatcgcaatggcatttgctacaccaaagctggtgataacccaggtgccttcgtctgtacttgctcccagaaagccagatattgtcggtattgcgacgttagaaatagtggaatccaacatttgcataaatgtcgctaaactcaatgcaatagtgacgcaccataacgtcccaccggttaatggtgccggagtacttttagtgattgccattaaagttgtccattatggctaataatgttgctaatttctttttctatcggactggtatcgataactaaagccttactggtataagccggcatggaggtcacggtactagccagctcaggcatctcggcaatgtcttcgttcttcgtatcaatagttgctgtcatgcttaaaccaatacgcaaggggtgttccatgagttcttttggatcaagagaaacttcaaccggtacacgctgaacgattttgatccagttccctgtcgcattttgtgcaggtaataaggagaacgcattgccggttcccatattgatccctgtcacccgaccatgaaacacaacattttcaccataaagatcgctgataatattgacgctttgaccaatccgtacatccgtgagttgtgtttctttaaagttggcattaacccacatttgacgtgccggtacgacagccattaagctttgtccggggctcactgtttcgccgacctgaacacttctctgggcaatatagccggtaaccggactcttaatatccgtacgtttaagcgccaaccaggcttctttagttgcatccgccgcttcaacgacttgtggctgacggtttaatggtgtgttcattactaaagctttattcgctttataagcctggatagcggcattcaatgccgctttgctacttattaacgtatctttggtatgctccagcgtttctttactaataaccccctgcttcgctaacggcactcgacggttataatcttctaaagattgttgatactgaatacgtgcactagcgacttcggcactgtattgtttatcctgtaagtatagtttattcgtttgccgaacaatatttgccagattatttttagctttattgagtgcgatagtggcatcagttttatccagactaactaaaatgtcaccttgtcgaacgtagttcgtatctttatgattaacgacagtgacactaccactgacttgtgcagaaattggatctgcattccccgtgacataggcgtcatctgtactaatcatgtcttctaattccatactccaataggcataggcaccactaaacgcaataaataaaactaccgccaataaagaaaagtattttcttctgttagaatgttttttattactattaatctgttccactattatctctcatttctcatagatgaaatttatgaattgaatgaaaagagcattcattcttcatatcaaacacagtgcatgtgttgcacattatcccaggaacgttggaggcctaatttaaatgaggtgcaaaaaaaacaacagaggactaaaccgtggcttttgcaatacaattcttacgcctgtaggattagtaagaagacttatagtgccaacttgaaactataaatcatcggtacaatccctgattttattgttgacatttcatttatgccgactatttatatggtatacttgtcgaattatcttaaaggaagctcagattttcttatttttattgagaaaatgagatgacgccttatgtctgtattactacagggagaagggagatgcttcattgcaaagggaataatctatgaacgcaataattattgatgaccatcctcttgctatcgcagcaattcgtaatttattgatcaaaaacgatattgaaatcttagcagagttgactgaaggcggaagtgccgttcagcgggtggaaacacttaagcctgatatcgtcatcattgatgtcgatatccccggagttaacggtatccaggtgttagaaacgctgaggaagcgccaatatagcggaattattattatcgtctccgctaaaaatgaccatttttacgggaaacattgtgctgatgctggcgctaatggtttcgtgagtaaaaaagaaggcatgaacaatatcattgcggctattgaagctgcaaaaaatggctactgctatttccccttctctctcaaccggtttgttggaagtttaacgtccgaccagcaaaaactcgactccttaagcaaacaagaaattagtgtcatgcggtatattcttgatggcaaggataataatgacattgctgaaaaaatgttcatcagcaacaaaactgtcagcacttataaaagtcgcctgatggaaaaattagaatgtaaaagtctgatggatctttacacattcgcacaacgtaacaaaatcggctaaccacatgaagtttttaccctatatttttcttctctgttgtggtctttggagcaccataagtttcgcagacgaagattacatcgaatatcgtggcatcagtagtaacaaccgtgtcacacttgatccactacgtctgagcaacaaggaattacgttggttagcgagcaaaaaaaatcttgtgattgcagtacataagtcccaaacggctacgttgttgcataccgatagccagcaacgggttcgtggtattaatgctgattatttaaatcttttaaaaagagcgttaaatatcaaattaacactccgggaatacgcagatcatcaaaaagcaatggacgcgcttgcagaaggtgaagtcgatatagtgttaagtcatttagttactagcccgcctcttaataatgacattgctgcaaccaaaccattgataattacctttccggcgctggtaaccacccttcacgacagtatgcgaccgcttaccagtccaaaaccagtaaatattgctcgggtagcaaattaccccccagacgaggtaattcatcaaagttttccaaaagcaacaattatctcttttacaaatttatatcaggcattagcatccgtcagtgctgggcacaatgattactttattggtagtaacatcattaccagcagtatgatttcccgctatttcactcactccttaaatgtagtgaaatattataacagcccgcgtcaatataattttttcttgaccagaaaagaatctgtcattcttaatgaagtactcaatagatttgttgatgctttaacaaatgaagttcgctatgaagtaagtcaaaattggcttgatacaggaaacctggcctttctgaacaaaccattagaactcactgaacatgaaaaacagtggattaagcagcatcccaatttaaaggtgctggaaaatccttacagccccccctattctatgacggatgaaaatggcagcgttcggggcgttatgggggacattcttaatattattaccttgcaaacaggtttaaatttttctccgatcaccgttagtcacaatatccatgctggaacacagcttagccccggaggatgggatataatacctggcgctatttatagtgaagatcgagaaaataatgttttatttgctgaagccttcataacaacgccttacgtttttgtcatgcaaaaagcgcctgacagtgaacaaacattaaaaaaaggaatgaaagttgccattccatattattatgagctgcatagccaattaaaagagatgtatccggaggttgaatggatacaggtcgataatgccagcgctgcatttcacaaggttaaggaaggtgaacttgatgctctggtcgcgacacagctaaatagccgttacatgatcgatcattactatcctaatgaactttatcattttcttattcctggcgttccgaatgcaagccttagcttcgcttttcctcgcggagaaccggaacttaaggatattattaataaagcactgaatgcaattcccccaagcgaagttctgcgcctgacggaaaaatggattaaaatgcccaatgtgaccattgacacatgggacctatatagcgagcaattttatattgttacgacattatccgttttattagttggcagtagccttttatggggattctacctgttacgcagtgttcgtcgtcgtaaagtcattcagggtgatttagaaaaccaaataagtttccgaaaagcactcagcgattccttaccgaatccaacttatgttgtaaactggcaaggtaatgtcattagtcataatagtgcttttgaacattatttcactgcggattactacaaaaatgcaatgttaccattagaaaacagtgacagtccctttaaagatgttttttctaatgcgcatgaagtcacagcagaaacgaaagaaaatcgaacaatatacacacaggtatttgaaattgataatggcatcgagaaaagatgcattaatcactggcatacattatgcaatcttcctgcaagtgacaatgcagtatatatttgtggttggcaagatattactgaaacgcgtgatctaattaatgcactcgaggtagaaaaaaataaagcgataaaggctaccgtagcaaaaagtcagtttctggcaacgatgagtcacgaaataagaacaccaataagctctattatgggcttcctggaacttctgagcggttctggtcttagcaaggagcaacgggtggaggcgattagtcttgcctacgccaccggacaaagtctcctcggcttaattggtgaaatccttgatgtcgacaaaattgaaagcggtaactatcaacttcaaccacaatgggtcgatatccctactttagtccagaacacttgtcactctttcggtgcgattgctgcaagcaaaagcatcgcattaagttgcagcagtacgtttcctgaacattacctggttaagatcgaccctcaggcgtttaagcaggtcttaagtaatttactgagtaatgctctcaaatttaccaccgagggggcagtaaaaattacgacctccctgggtcacattgatgacaaccacgctgttatcaaaatgacgattatggattctggaagtggattaagccaggaagaacaacaacaactgtttaaacgctacagccaaacaagtgcaggtcgtcagcaaacaggttctggtttaggcttaatgatctgcaaagaattaattaaaaatatgcagggcgatttgagtttagaaagtcatccaggcataggaacaacatttacgatcacaatcccggtagaaattagccagcaagtggcgactgtcgaggcaaaagcagaacaacccatcacactacctgaaaagttgagcatattaatcgcggatgatcatccgaccaacaggctattactcaaacgccagctaaatctattaggatatgatgttgatgaagccactgatggtgtgcaagcgctacacaaagtcagtatgcaacattatgatctgcttattactgacgttaatatgccgaatatggatggttttgagttgactcgcaaactccgtgagcaaaattcttccttacccatctgggggcttacagccaacgcacaggctaacgaacgtgaaaaagggttaagttgcggcatgaacttatgtttgttcaaaccgttgaccctggatgtactgaaaacacatttaagtcagttacaccaagttgcgcatattgcacctcagtatcgccaccttgatatcgaagccctgaaaaataatacggcgaacgatctacaactgatgcaggagattctcatgactttccagcatgaaacgcataaagatctacccgctgcgtttcaagcactagaagctggcgataacagaactttccatcagtgtattcatcgcatccacggtgcggctaacatcctgaatttgcaaaagttgattaatattagccatcagttagaaataacacctgttagtgatgacagtaagcctgaaattcttcagttgctgaactctgtaaaagaacacattgcagagctggaccaggagattgctgttttctgtcagaaaaatgactaaatagcggctcccacaatgttcaaatgtgggagctatttaccagcacatcttacatttaactactgaactcctggcgaatttgttccccatgctggtcgagcgttgccgctcccggcataacatgcgggtccgcgcagccgctgatttttatcggattacccggcatcattattcccccggcttcaatcaacatatttctcgcctgagtttgtggcaatttaatggcctcagccacacttaataacggcgcgacgggtacaccaacttcatgtattctggctaaccaaacttcagctgcctgcgtttttaacgtccgctcaatatattgtttaagaatagcctggttttgtacgcgtaaaatattgctgctaaatcggggatcattaaccagttccgtaagctccagtgcctggcataacgcagaaaaaagcttgtcattaccacaacaaatcgtaatcggcttatcctgagtattgaaaacatcaaaaggtgccatgtagggatggcgatttcccagacgttgtggactcttcccagttgcgatatatgccatcagaccatgctccagaaaactcagcgtggcatcaaacatcgctatatcgacatgcgcccctctctggctcttttcgcggccataaagtgcactcactattccgctgaataaatagacaccgccgcatagatccgcaagagatgtaccaacgcgcactggcggagcatcaggatatcctgtttccatcattatcccgctcattgcctgaatgatggtatcgtaggcaggagcatcttttagcggaccggtatgtccgaaaccactgctactagcatatatgaggcgcgggttgatttcttgaagcgtttcccaactaaaccccagtttttccattgtacctgggcgaaaattctcagctaatacatcagcttgtttgagcatatttataaatatacttttatcgtgatcattctttaaatcaagaaccacactctctttgccatgattaataaaactgtaatagagactctgtccatccacatagggaccaaatgtgcgggtatcatcaccatgacccggcggctcaactttaattacccttgcgcccatattacaaagaagttgagttccgaaaggtccattaaggacatgtgtcatatcgataactaataagccttcaaacggccctttgctttcattatttgtcatttgcttatgccttgaaaaaagccgaaggtgaaaagacacttcggcatttatgtaaaatcaataacatgattaattaactaaccagtcgactgacataaatccacaagggagccgtgacgacaaagcccagtacgctcacagccaaactcgctgtaccagtacgggtgtagacattaaaccggctggcaataatgattccggagaatgccggcggtaatgcgcctgccagtaccatcatctgcagatgttcgctgttcaaatgacatgccataccaacgagaagcagtgccagtggcatcagaatcagcttcaggaaggtgttataagcaatttcggcactgaactcgaatttatgtgcagccagagtcaaccccgcagcgaataccgctaccccactgttagccttcgcaatcagattaaaggttgggtcccatgctgccggaatttttaccccaaccaacaccaggatcgttgccagaacaggtgcccatactactggctcctttgccgcagaaattaatgcgctcagattactattcttcttaccatccgctccactagaaggattcagcaaatacagaccaataggaatagtaattgcgttaacaataatagaaataattgctaccactaaacctgtacttacggaatcaccataaataggatcgagaactgcaaaccccaggaatccaatggtaggactacctgcaattaatgcacatacagctgcttctgcatgggtacgtttaaaaaatttgtagcaaccgaaccaggagaaaaagaaacatccgacaataaccacaagacttacaagggtcagacgagtgtccgcaaaaatcatttccctgtttgcccgagtaatagatacaaatagagccgcaggaagcgcgtagtttaataccagtttattaaatgcccgagcttgatcttcactaaatgtttctcgtctgccgctaaaataacccaacagcatgattacgataataggcaataaatcgccaataaaaaatgttagcataatagtatttccgataagggtcccctcaccatcgcataatgagttggcaagaggagacgatgtcagtatttaattaccagcgacttgttttgggttaagtttggtaatatggccactttcagttcctgctgcagggtcgatgaccacattaataatggtcggtttgcggctctgaataccggtggttaaagcatgacgaagttcatctgtcgtggtgacgttatagccaacgccacgaaacgcatccattaatttgtcataccttgcatggtgcaacagatccgttggacttggtgcaccagcgccactgagatcaacaccgtctcctctgtagatgccgccattattaaaaataacgatcgtcaccggcaggttatatcgacaaatcgtttcaatttccatcccactgaaaccaaaagcactatcaccttcaatggcgacaaccggagaaccagaagtcacgctagcaccgatggcatagcccataccgatgcccatgacaccccaggtaccacaatccagacgacgacgtggtttatacatatcaataatatttcgtgcattatccagggtatttgcaccttcattaactaaataaatatcctggttctcgcgcaatacgtcgcgcacagcacttaatgcattaaagtaatttaatggttgagtatctgtacttaatttttcatgcattttttgtgcattttgctgcttgtggatatttaaaatatcgcgccataccagtggagtcgtaaatgtgttttgtttcagttctgccagcataccttgcatactggatgcaatatcaccaacgactggcacagcaatggggcggttgctgtcaatttcctgcggttcaatatccagttgaataaactgtgtatctgccgcccatccttttttaccgtgtgccaataaccaattcagtcgtgcaccaacaagcatgacaacgtcagcatttgccagggcaaagctacgcgcagctgccgcagaaagtggatgcgtatcttcaaggatccctttcgccatagacattggcaggaatggaatctgagcactttcaataaattcacgaagctgttcatcagcttgactatacgccgcgcctttgccaaggataattaatggccgttcagcttttgctaaaaggctaattgcgctagtgacactcttcgggcatggcaataatgctgggctcggattttcaactttaacaatcgtggttaacgcttcgtctttttccatcgtcgcggccaggacatttgctggcaaatcaagataaactccgccagggcgaccgcttacagagacccggatagcgcgtgccaatgcaatgccaagatcctgcggctgattaacgcgaaatgctgctttggcatacggttttgccgcattcatttggtccagctcttcataatcaccttgctgtaggtcgacgatcgcgcggtcgctggagccgctaatcatgatcatcggaaaaccatttaccgttgcgttggccaatgcggtcaaaccattgaggaatcctggcgcagaaactgtcaggcagatccccggtttttgggtaagaaaaccgcttgccgcagcggcatagcctgcgctctgctcatgacgaaaaccaatataacgaatgccttccgcctgggcatggcgtgccatatccgtcacaggaatacctacaacaccataaatagtgtcaatattattctgttttaatgcttcaacgatgatatgcataccatctgtcatttgaagttgatcactcatgattaataacctcgaaatttttataaattgggagccagaagcccccgttaatatcagatggcgtggttttgcttcattgcagcaatttcatcgtcgctataacccagctcctgcaatacagcagcggtatgttcacctaatagcggcgcagctttaatatccggcgtaaaggcagagaatttcattggacaaccaacggtcagatattttccacgcaacggttgttccacttcaacaacactgccactttggcgcaaagagggatcaagactaatttctttcatacttaaaaccggtgcacaaggaatatcaaactgagtcaaataggccaccgcttcatgtttatcaatagtgacagtgtatttttcgatttcagcaaaaatatcgaaaatatgtggctgtcgtgcatgggctgtactgtatgccggatcggtaatccattctggtttgccgatggctttacaggtgttttcccagttttgctcctgaatagtgaaataaatataggcgttaggatcggtttcccagcctttacatttcaggatccagccaggctgaccgccaccacctgcattaccaccgcggggaactgcatcaccaaatgtaccattcggatactgcgggtattcttccagataacccaatttatcgagacgctgctggtcacgtaatttcacgcggcaaaggttcaatacggcatcctgcatactcatggtgactcgttgcccacgccccgttttttcgcgatgcagcaaagcagcaagtaaaccgatcagcaaatgcattccggtgttgctgtcacccaacgctgcagcgcttaccagcggcggaccatcccaaaaacccgtagtggatgccgcgccacccgctgcctgagcaacgttttcataggcttttacattcacataagggctacactcatcaaaccctttgatgctaccaaaaatcagacgtggattgatttcttgaatatgctcccaggtgaagcccatgtgatcaatggcccctggatgaaagttctcgactaagatatcagcttcgcggatcagcttttccattacctctttgccttccgctgttttggtatttaactcaatagaacgtttgttactgttaagcatggtgaagtaaagcgcatcgatatcaggaatatctcgcagctggtgacgcgttacgtcaccaacgccgggacgttcaattttaataacgtcagcgccaaaccaggccagcatttgagtacaagatgggccagattgcacaccggtgaaatcgagaactttaattccttgaagtggagtactcatagcaatacctattagttaattaaatatgtgttaatttagcgtttatttaaggcgtaatatcttctataaataacccgcaaaatatcgtcgtagctgcactcgatatttttaaaatcctgtatcaagtgctgaaaatcatttcatcgccacttccaattcctttctgcatggtaagtagtgaggacgaaaagaagaatatgataaatattgattcgtggtaatcagagagagtcgcgacatttgtgatgttattcttacaactgtaagaagcgccggtgatttacaagcaagggtatgattacgctttttaaagcgtaccataaaacataacataataaatgatttgtgatgacacgggattattgcggtttactttgaggaatataaaatgcgagtttatagcaccgcgagcgccaaataattttatgaccacaacctgtcgtattgtggtcataaaaaattgtcggctggagggagttaaatcctttacctcaatatactgcctgtcagcattagttcacaaacagtgcttcgctatcgacgatgattccatcttccgcacctttaagcgccaggtttgcctcgtagtattgctttttatcaagcagtttctgcgcatcagcaagtgcattacgagtctgtttaagtggcatcagatattggttttccattacgccaacaccggccaggcgaagctcttccattgcgccctttttatcccctttcgccattttttcattggcaatttttatcgcggcttctttttcgggagttgctacataactctcagaaattccgacagatgcattaatgacaatatattggtcatcattgagattggtctttttacctggcttagcgaactttgcccattcggtactgtcatcactcagcaaagcggaagcttcattggtcagttcttttgccttttctggatcgccatgaaacagagccaggcgcgctacctgcacgtcacgcatcgcatataaaccttgttcagagatacgctctgctgccgctgccgttttctgggtttgctgaacttgctgagtttgctgttgtgccgctaccggagcattatcagcagcccatacagtactagatgccagaattgctgtgaccatcgtggccataattaaacgtttcatacttacctcattctttaacagttttagaaaacgccgccatcatattgggtgagcatgaaatgagaaatcagagagcaacggtcattttgaaagggttatcttacagttgtagttattatcgcaagaagtattttagtcttacaattgtaggaatatgcttcctgtcgcagagaactattcttatataccacaaagagatgtcatttattatatcgatgtaaatactgattaattaaatgtaaatacagccataacatcgtaggttctcagtgaaccattttcaggataactttctatgaaagtaaacttaatacttttcagcttatttttattggtctctattatggcatgcaatgtttttgcattttccattagcggtggtggaagtgagaggagctataaagagactgaaaaaacaagtgcgatgacgaccacacactctacaaaacttcagccaagtcaggcgattttgtttaagatgagagaagatgcgccaccattaaacctcacagaagaaatgccgcccccttttccgacaaaggcgaattatcttattcatcctgtgcgataacgtctttcacatggcaggtgaacaatcatgtctgatgctgatgtgaacacctgcccaaatgagccatcctgacccattaccgcctgccataccccaccataaagcgaatcatcaagccacaagccggggcaagaaacataaatatccccgtcactagttcattaccgccagttaaccacatggtgaagtaataaatgagtgcagcgaggatcaccatgccgaagaaagaagagaccgcgcttaccacgttcagtacctgaccgatgtagccgcttacgcagacaatacacagggcgagaaacatccataaattaatcatagctcaacctcctgccgcgctaaaaaacctgtaacttcagtcactttaatagtaagacaatccttaacctctggcaatttttgctaagcatcaatgaaaacagcatgttaaatgcaagactgttgtgtacggaaaaatatttactttgcacgattaataatcagtagctgaaagcagtcagcgagtgataaagtacagataccgcattcatgctcctcgtggttatgtcctgactagtctttacactctttacaggaaccattgtcgtacatgatggcccaaccaattgagtgtaccgctgtcgacatggaatcttctgcgatacaacaattcgtatctacagaaggtaactatgtttccacaatgcaaattttcccgcgagtttctacatcctcgctactggctcacatggtttgggcttggtgtactctggctttgggtacagcttccttatcctgttctctgctttctcggcacgcgtattggcgcaatggcgcgaccattcctgaaacgtcgtgaatctatcgcccgtaaaaacctggaactttgtttcccgcagcattctgcggaagaacgcgagaagatgattgccgaaaactttcgtagtctcggcatggcgctggtagaaaccggcatggcatggttctggcccgacagtcgcgtacgtaaatggtttgatgttgaagggttggataaccttaaacgcgcacaaatgcaaaatcgcggcgtaatggttgtcggcgtccattttatgagcctggaactgggcggccgcgtgatgggactgtgccaaccaatgatggctacctatcgtccacataataatcagctgatggaatgggtgcagacccgtgggcgcatgcgctctaacaaagcgatgatcggcagaaataatctgcgcggcattgtcggtgcactgaagaaaggtgaagcggtatggtttgctcccgatcaggattatggtcgtaaaggcagctccttcgcgccgttctttgcggtggaaaatgtcgccacaaccaatggcacctatgttctctcccgtctctctggcgcagccatgttgaccgtaacgatggtaagaaaagcggattacagcggatatcgtttgttcatcaccccagagatggaaggctacccgacagatgaaaatcaagccgctgcctatatgaacaagattatcgagaaagagatcatgcgcgcaccggagcagtacctctggatccaccgtcgctttaaaacgcgcccggtgggagaaagcagcttgtacatttaacaaactgctcttactctttccctcctcaaatcggccataataacctcatggtttttatggcttttttcttaaggttttttccttcgctgaatatctaattattaccgtcagaaattaaactgtcgccgatatgagacacttgtaagttactaaaagtaaataagaaaatgcctcttgtctcgtttcagttttaggcgtacattagcgccgtctcgagcagtttagctcagaattctggggtgatgcccacggtaaaatacagggcttttaaggtcgctttgcccggtgtcaactcactgtatcaggtgtaatgaagtcattcaggcgtaacagtaattacgcggagagatgtaaagtgaaatatttctttatgggcatttcttttatggtcatcgtttgggccggtacttttgccctgatgatctaaaagcaaactgtgcaatgaaaaacaggagccatcaggctcctgtttgcatttctgacgacggtgtttattccgcgttttcgtgaatatgtttgctgctggcgggtagtaaaccgtcggcacggaacatcgctttaatccctctgatggcctgacgaatacggtcgcggttttcaatcagtgcaaagcgaacatgcgtatcaccatagtcgccaaagccaatccccgggctgacacaaaccttcgcttcgttaaggagcttcttggcaaattccaggcttcccatggccgcatatggttccgggattttcgcccagacatacatgctagccttcggcatttcaaccatccagcccgcttcatgcagccctttaaccaatacatcacggcggcgtttgtactgttcggcaatgtcgcgcacgcactgttgatcgccctccagcgccgcaatcgccgccacctgcaacggcgtaaaggtgccgtaatcgtgatagcttttaatacgagccagggcgctgaccagcgttttgttgccaaccataaagccgatacgccagcccgccatgttgtagcttttgctcagcgtaaagaactcgactgccacatcgcgtgcacccggtacctgcataatactcggcgctttccagccatcgtagacgatatcggcataggccaggtcatggaccaccagcacatcgtagcgtttcgccagcgccactactttttcgaagaactccagttccacgcattgcgcggttgggttactcgggaagccgaggatcatcatcttcggtttcggataactttcacgaatggctcgctccagttcgttgaagaaatcgacaccttccaccagcggcacactgcgtacctgcgccccggcaatcaccgcgccataaatatggatcgggtaacttggattcggcaccagcaccgtgtcaccatgatccagcgtcgccagcatcagatgcgccaggccctctttgctaccaatagtgacgatggcttcactttccgggtcgatttcaacgtcgtagcgatcctgataccagcgggaaatggcgcgacgtaaccgcggaatgccgcgactagtggagtaaccatgcgtgtccgggcgctgggccacagtacataatttttcgacgatatgcggcggagtcgcaccgtccgggttacccatgctgaaatcgataatatcttcgccgcgccgacgcgcagccattttcagttcagcggtgatgttaaaaacgtagggcgggagacgatcaatgcgcgtaaagcgacgttcagggcgagtgtcagccataatttcctcagattaacgttagcgcccggaccgtccgagcgacgctgccacgatggtggctgttttgaaaatagcctgattaatttctgtctgtccagcgttttagaacattttattaatgacgttaaatgaggaactctgctttaaaaacaggaaatttatctgcgctaacaagaaaattaccactcattttattaacataataatttcaataaatttactaaccagaagtgcattatcaagagatgcattgctaatacaccatttatctatcaatccccttttaaaattgtggtttttcctcaaaaacggcctgctggtcatcagccttcaggttacctatcatagaggtttaatccttattcagagtcacccgtgcacgaaatattcaacatgctgctggcggtcttcgatcgggcagcgttaatgcttatctgcctgttctttctcatccgtatccgcctgtttcgcgaactgttgcacaagagcgcgcactccccaaaagaattgctcgccgttaccgccattttcagcctgttcgccctgttcagcacctggtccggcgttcccgtagaaggcagcctggtgaacgtacgtattatcgcggtgatgtccggcgggattctgtttggcccgtgggtaggcatcattaccggcgtgattgcgggtattcaccggtatttaattgatatcggcggcgtgacggcgatcccctgctttatcaccagcattctggcgggttgtataagcggctggatcaacctgaaaatccccaaagcacagcgctggcgcgtcggtattctcggcggcatgttgtgtgagacgttgaccatgattctggtaattgtctgggcaccaactaccgcgttggggatcgatatcgtctctaaaatcggcattccaatgatcctcggtagcgtctgtatcggctttattgtgcttctggtgcaaagcgttgagggcgaaaaagaggccagcgccgcgcggcaggccaagctggcgctggatatcgccaacaaaacgctaccgctgtttcgccatgtcaatagcgagagtttacgcaaggtctgcgaaattatccgcgatgacattcacgccgatgcggtggcgattactaataccgatcatgtgctggcctatgttggcgtgggtgaacataactatcagaatggcgatgacttcattagcccgactacccgtcaggcgatgaattacggaaaaatcatcattaaaaacaatgatgaagcccaccgcacaccagagattcattccatgctggtgatcccattgtgggagaaaggggtcgtgaccggaacgctgaaaatttactactgccacgcgcatcagatcaccagcagtttacaggaaatggcggtcggtctgagccaaatcatctccacgcaactggaggttagtcgcgccgagcagctacgtgaaatggcaaataaggcagagcttcgcgccctgcaaagcaaaattaatccccattttctgtttaacgctctgaacgctattagtagcagtatccgtctgaatccggataccgctcgccagttgatctttaatctgagccgttatctgcgctataacattgaattaaaagacgatgagcaaatcgatatcaaaaaagagctgtatcaaattaaagactatattgccattgagcaggcccgctttggtgacaagctgacggttatctatgatattgatgaagaggtgaattgctgcattcccagcctgctgatccagccgttggtggagaacgccattgtccacggtattcagccttgcaaaggtaaaggcgttgtcaccatcagcgttgcagagtgcggaaatcgggtacgcattgcggtgcgagataccgggcacggcatcgatccaaaggtgattgagcgggtcgaagcgaatgaaatgccgggcaataaaattggcctgctgaatgtccatcatcgcgtgaagttattgtatggcgaggggctgcatatccgccgcctggagccggggacggaaattgcgttttacattcctaaccaacgcaccccagtcgccagtcaggctacgttattgctttgagccggagtgatattgtgaaagtcatcattgttgaagacgaattcctggcacaacaggaactgagctggctaattaaagagcacagccagatggagattgtcggcacctttgacgacggtctggacgtgttgaagtttttgcagcataaccgcgtcgacgccatttttctggatatcaatattccgagcctggatggcgtgttgctggcgcaaaacatcagccagttcgcccataaaccgtttattgtgttcatcaccgcgtggaaagaacatgcggtagaagcgtttgaactggaggcgtttgactacattctcaaaccgtatcaggagagtcgtattaccgggatgctgcaaaaactggaagcggcctggcaacaacagcagaccagcagtacgcctgccgcgacggtaacgcgtgagaatgacaccattaatctggtgaaagatgagcgaataatcgtcacgccaattaacgatatctattacgccgaagcgcacgagaaaatgacctttgtctatacgcggcgtgaatcctacgtaatgccgatgaacattaccgaattttgcagcaaactgccgccgagccattttttccgctgccatcgcagtttttgtgtcaatctgaacaaaatacgcgaaatcgaaccgtggtttaataacacctacattctgcgactgaaagatctggattttgaagtgccggtcagccgcagcaaagtgaaagaatttcgccagttaatgcatctttaatcgggaactttcatgaaagcaccaggcttgcccgccgatcaacaatttttcgccgatctgttcagcggcctggtgcttaacccgcaactactggggcgcgtctggtttgccagccagcctgccagcttgccggtgggcagtttatgtattgattttccccgtctggatatcgtgctgcgcggcgaatacggcaatctgctggaagcaaagcagcaacgtttggtggaaggagaaatgctgtttattccggcgcgcgcggctaatttaccggtcaacaacaaaccggtgatgctgttaagcctggtgttcgctccgacctggcttgggttaagcttttacgatagccgcaccacgagcttgttgcatcctgctcgccagatccagcttcccagcctgcaacgcggtgaaggtgaagcgatgcttaccgccctcacccatcttagccgtagcccgctggagcaaaatatcattcagccgctggtgttaagtttgctgcatctttgccgtagcgtggtgaatatgccgccgggcaatagccagccgcgcggcgattttctctatcacagcatttgtaactgggttcaggataattatgcccagccgctcacccgcgagagcgtggcgcagttttttaatatcacgcccaatcatctgagtaaactgtttgctcagcatggaacgatgcgttttatcgagtatgtgcgttgggtgcgaatggcgaaggcgaggatgattttgcagaaatatcatctgagtattcatgaagtggcacagcgttgcggttttccggatagcgactatttttgtcgcgttttccggcgtcagtttggtctgacgccgggagagtacagcgcccgttttcagggctaacgtcagaaggttaattctgtttccagcagcgtcaggatactttgtgcatcttgcgcggcaaacaagctctggcggaagtttttattcaccagtttacgcgccagctggctgaagactttcacatgattcatcccttcgttagcacccagcgtcagcatgatcaccagttcgacttcgcccatttcactctgccagccaatcggtttcgccagccgggcaatgctgatactggaatgacggatccactgagatttggtgtgcgggatcgctacgccaaaaccaacgccggtggtaacaatctcttcccgctgccagacatcttcttccagctcaaacggatgttcagtgcgcccgttaacgccgaggttgccgcacaggaactggatcgcctgctctttattgctaaaatcctgatcaacaaagatattctccagcgccagcagtgggcgaacgtcttcttccggcgtaaaggcggtgagtaacgcttcaatttcctgcgcactgcggcattcacatgcctgacgcgccagttcccgacacgcctcgctatccagttgacgaagctggcttttcaccgccggaatacgcgggctactcatactcagctcatccaggcccagcccaagcagtagcggcagataacggctttcaccgcccagttcaccgcaaatgcctacccatttgccccgctgatgcgcagtggtaactatttgctgcaacatgcgcaggaagcttggcgtaatcgggttatatagcgggcttacgcgcgggttattacgatcgaccgcatacagatactgggtcatatcgttggagccgatactgaagaaatcgacctcatcgcagaagtggtcgatgatgtagcacacgctcggaacttccaccatgatcccaagcgtaatcgtctctgcatgacgcaggccatcgcgcttaagctcaacgatcgctttttggatctcgcctttcacccataagatctgatcgaggctgtgaaccatcgggatcatcaactgggcgttgccgaaactggcggcgcgcaaaatggcccgcagttgagtgcggaacaggccagcaaattccgggtaaatacgtaccgcgcgatagccgaggaacgggttctcttcctggggaatattcagataaggaatgcttttatcgccgccgatgtccatcgtgcggaagataatcggcttgtcgcccgccgccagtagcacctgctggtaggcttcaaattgctcctgctcgtccggcgcgctgtcgcgatccatatagagcatttcggtacggaacagcccgacaccttccgcgccgttggcaaacgcgcctggcgcttccagagcggtgccgatattcgccgcaatatcaatacgcttgttatcacgggaataggccagctgcgcggcagcctgcgcctgttgtttttggcgtttatccgccagcgtctgcgcgacctgataataaccgctcaccgcgtcattcgggttaatcgccagcacgccgcactgggcgtcaagcactgcaggttgcccggcataacgggcaatcgcatccagcggcaagccactcagtaccgggatcgcgctggcacgggccagaatcagtgtatggctggtgcgcccggttttctccagaatcatgcccgcaagatttttcaaatcaaggctcaaaaactggcttggggttaaatcttcagccaccagaatggtcggtttttcaagcaccagcttgttgcgcggcttcagttccggccaggtgatatgcagcaactgttcgctgatatcgcgaatgtcgctaacacgttcgcgcagataatcgctggcagaggcagaaagtttggcgcaaacctgctccatattgctgatgatcgccgcccccagcccctgatgctgttctgtcatcaggcgacggatattgcctgcaaattcatcatcctgaatcaggctcaaatgggcgctgaggatagttttgctttcgccgtcacgctcacgcaattgctggttcagttgctcggcaagcgttgccaggctgtgctccagccgggtggaatcttgcgcactggcggggattgcccgataactgtcgaggctgtcgctttgtaacagggtcagcgtacccacgccgacgccgcttgccagcacattgccgtacagtaaatccgggttaaggcggcttaaactacgcggcagcggatgcgccgtcagttctgcctgcgtaggctgaacgctgtcgctgtcgataaagcgcacctggatgtactcttccagcacgcgccgcgcctgctcttcatcgctgccgctaatgttcaggctgcaactgtcattaaatagggtgccggtgccaatcagcgccaggctgcttttcgcatctgcctttgcgttctggcgatggttaataaaagtgatttcgctttgccactggctgcactgttctttaagttcccacgccggacgagcatgtagaccgttaggcaaaggacagagaaattgaatcgttaacataaccgctccgggttaatcaggagatcatctgaaatccgtcagttgaacaaccgtctcacgcgtaagacgttgaataagggcagataaaagttgctgcatctgcaaaatgtcgcggcaatcggcaatgcttgcggcgcaatgtccatggcgggttgctggccccatcaccactgtgggcacgccggtgccggttaagtgcaccgccccgccgtccgtgccgccgttgctgaacatatctgcctgcaacggcacgccaatttctgccgccacggtttcgacccaggcggtaagttttggcggcgcaatcaggctcttgtcgcttaacaccagcatcggcccgttaccaatctggcgatggttagccgcgccataatcaaagtttttcgcccagcaggcggtatcaagcacaatggcgacgtccgggctcaccgcgcgggtggcagtttgcccgccgcgtaatcccacctcttcgctggaacttgccaccagccacacttccgcaggtagttcggcgtcgtgcagttcgcgcagtaacgtcaccagcagatagcaaccgaggcggtcatcaaaggctttccccatcactcgctggtgagggagaacctgaaaagtggtatcaaacgtgacgcgatcgccgggacgaattcccgcctgcatcacttcgtcataggagcgcgcaccaatgtccacgcgcatggcgctgacgtcattcccctgccggtcgccgtcaagcaggcctggaattttgcactcttcacgggtggtgatgcgcaccggctgcagctggcgggcagccatgcgtacgttgccaaccggcagcacatcaatcgccccttcgcgggagatgctgcgcaccataaatcccacttcgtccatatgcgcacagatcatcaccttcggacctgtgctttcattcaggcggatcagcacgcttcccagaccatcaaatcgcacttctttttgcaggcgatccgcttcttccagcaggatctgccgcacttcctgttcgctggaggcgatcgcatctgcctcgctcaacgcttttaataggcttaaatccattatgcctctcccgtgagcaacactgttttcggcatggcgtagagcacttctgcgccttgcggggtaaccagcacaacatcttcgatgcgcacgcccccttgccctggcaaataaatccccggctccacggtcagtaacatgcctggctgtagcgtcgtggtgtcccgcggactaaaacgcggatcttcatgaacttcaatgccgatagcgtgaccggtgttatgaccgaaatagtcgccataacctgcttctgtaatgacccggcgcgcggcatcgtcaacctgctggcagcgcacgccggggcgaatcgcggagattgctgcgagctgtgcctgcaggacaatttgatagacgttaaacagcaggtgagattcggcgctcaccccttcgccattcaccagcaaggtgcgcgtcatatcagagcagtagccctgatacagcgcaccgaaatcgagagtgacaaactcgcccgctgcaacaatcttgtcgctggctttgccgtgcggcagcgccccacgccagccactggcgacaatggtgtcaaaagaggctttttctgcgccctgctggcgcataaaccactccagttcagcggctatctcgcgctcgctcatccccgcctgaataaagcggcgaatatgctctgcaccgcgatcagcaatcccacaggcgaggcggattttctccacctcctctggcgttttgatttgccgcagcacatccggcgtggcgctaaccagtttcgcattgagttcagactgccagcggtgcgcggtttcccaactcacctgctggccctcaaaaccgagcgtttgcaactgttcatcggcaatgatttgattgacgatagtggtaagcgtgttcgtcgcgtcaagcaaatgcagctggtagccttgcgcacgggcttccacctcaacgtaatagcggctatccaccagaatgtgcgcactttcacggctaatcaccacataaccacttccggtggagatccccagatgcggctgtttgttctgccgactggagagaagcactgcatccagttgttgcgccttaagccagtcgcgcaggctagcgagtaatgtcatctggattttccttcttacaggctatcgattaacaatttgcctttacggaacatcatcagacgcaggaacaccaccatcagcgcagttatgactgcccccagcgcgatccccgccatatagacgcccaggttagtgaccagcggccatgcccagatagcggactccgggaaccattgcactgcgcccagccagacagcggcggtactgccgacaatagcgccgaccatatagctcggaatggcggtgatggggctttccagcgcaaacggaatcgcaccctcactgatccccataaacgccaggaacatggcggtcttaccctgcggataaagttgagcgttgaacaggcgtttgccggttaaacgacggtcgataatggtcgccagccccagaccaatcggcggaataacgatagcgatagaacgagcggtgaccggtaatacgtggtcagtggtaaagctgaaggcaacaaaacctgcggctttgttgatcgggccaccaaggtcgattgctgtcgccgcggcgatccccattgcgtacatcagcgcgcccttctcacctgcggcagtcagcacagtacggataccgccgttgatccagccaccaaagggggtgatgacgtagtacatcgccagcatgacaaaaatggcggaaagaatcgggagcaaaaatgtggttttgaacgctaacaggaaatccggtaactggattttctggttcatccacttcacaaggtaaccggcaacgatagaaataatcagcgcaccaatgaaggtggacggcaccgggctagaggtcgcccattgcatagtgctgggatcgaagttcagcagttgcgtcggctgggtagacatcaacccgccgataaaaccagccgggaacgccagtttgccaccgatagagttcgccacaaaagcagcaaacatcggaatggcaaaaccaaacaacacgccgccgaaggactggctcagccaggcaaatttaagtaaggagaggtcgaaaccggagaatttcccgctattaagagcatccatgatgccgatctcagcaggaattttaagccagctataagcaatcagctggctgaaagcgaggatcacaccgcccataattaaggtcggcaccatgcgactaatcccactcatcacatgctgcgggagttcaccccagaagctggttttagaggcctgcggattcttaactgccgctgccgcaccggatgcgccaggcacaacggttgcactgcgttttttaatggccataacaattatccctgtcgaatattactgttgttcagaggcaatcatctcttcgatttctttgatgatgcccgcagcgtttttaattgcgtcctgcaaagtgatttcataaacgtcgcgactttcgaaacgttcgttatcttccggggtaactgccacggagtggatgatgatggtcgcttcggcgatatcctgcgccgtcaggcgattctggataccgtccgcgccctgggtttcaattttcacttcataaccggcttctaccgccgcttcttccagcgcctgagcggccataaaggtgtgagccaggcccatcgggcaggcacataaggcaatcagtttcttactcatcgttaattcctcgttcagtgatagttgacgagtgaaattatgaacgtgcaaaacaaatcgccgttaccagacaaataatgcatttactggagaattaatcccgctgtacggaagtgtgacgcaggtcgaccttgtgaggggacacaaagaaaaattgaataaactgtatgatttaaaagattatcgggagagttacctcccgatataaaaggaaggatttacagaatgtgacctaaggtctggcgtaaatgtgcaccggaaccgagaaggcccggattgtcatggacgatgagatacaccggaatatcatggacatattctttaaagcgccctttatcttcaaatgcggcacggaaaccggaggctttgaagaactcaaggaagcgcggcacgataccgcccgcaataaacacgccgccaaatgtcccgagattgagcgccagattgccgccaaaacggcccataatgacgcaaaacaggctcaatgcgcggcggcaatcggtgcagctgtcagccagcgcgcgttcggtaatatcttttggcttgagattttctggcaggcggttgtcagctttcacaattgcgcgatacaaattcaccagcccagggccagaaagcacgcgctccgcgctaacatgaccaatttccgcacgcaatatttcgaggataatggcctcttcttcactattcggcgcaaaatcaacgtgaccgccttcgcctggcaagcttacccaacgcttatcgacatggaccagatgcgcaaccccaagccccgttccggcaccgtaaaccgcaataggcttaccttcgaccggttctgcgccaccaaactgaatcagatgctcttttttcagcatcgggatcgccatgcttacagcggtaaaatcgttaataatttccagatggctaaaaccgagattctttttcatttcggcaatactgaacgcccaggtatggttggtcatcgccacccagtcaccggtaattgggcaagcgatggcaatacagccgtctttcacctcgaccttatgttcttcaagataaacgcgaatgaccgcttcgaggctggggtaatcaagcccactataggtcttagcctggctgatttcaccactggcaatatcacacagagcaagacgtgcgttggtgccgcccacatcaccgactaatgcatactttgtcattcttcaactgctccgctaaagtcaaaataattctttctcacactgtaaatacctgggggcataacaacaacgccggaaaggcaggctccctgtaaatatcgatctgggtcacacaattactttatcgtttcagcaccaattgcagcgatgcctttttgcaagctgggcaaactaagtatctgaccccgcataaggaatagaacacaggcggcactaacccggacgtagactgtattacaaaagcggcaaaaagcagagacaaaaaacccccgctttgcagcgagggttggaaatttggtggagctaagcgggatcgaaccgctgacctcttgcatgccatgcaagcgctctcccagctgagctatagccccacgatgcgtttacgtaccaagtttgctgggtgcaaaatttggtggagctaagcgggatcgaaccgctgacctcttgcatgccatgcaagcgctctcccagctgagctatagccccgtcacgtaaagcttgtcgagttgacgggcggcatcatatgaattccgcccgaatgtgtcaacggcaaattgcaacgtgtagtttcaatcgctgaaaaatcaggcaaatgaacaattttggaaaaccgctcgcattcagtagttattcatgtcacggtttcctgtaaagtggtgttataaaatgaactactaatagacccacatacattcagggaattgttatgttcaaggagaggatgacaccagatgaacttgccagactgaccggctatagccgccagaccattaataaatgggtacgcaaggaaggctggacaacgagtccaaaacctggcgtccagggtggcaaagcccgactggttcacgtcaatgaacaggttcgtgaatatattcgcaatgctgaacgtccagaaggtcagggagaagcgcctgccctttctggtgatgcgccgcttgaagtattgctggtgacactggcgaaagagatgacgccagttgaacaaaaacagtttacatccttgcttctgcgggaagggattatcggattgttacaacgcttagggattcgcgatagcaaataatatgaaaagattacgcaataaaatgaccaccgaagaactggctgaatgcctcggtgtggctaaacaaactgttaaccgttggatcagagaaaaaggctggaaaacggaaaaatttcccggcgtgaaaggcggtcgtgccagacttattctggtcgatacgcaagtttgcgagtttattcagaacacgccagccttccataacacaccaatgttgatggaagctgaagagagaattgctgaatacgctcctggagcacgcgccccggcgtatcgacaaatcatcaacgcgatagataatatgacagacattgagcaggaaaaagtcgcgcaatttttgagtcgtgaaggaattcgcaatttcctcgcccgtctcgatattgacgaaagtgcataaataaaaaacggcaggatattatctcctgccgtttatctttttacacgctaattactgctgattttcgcgttcagcaataaaatccagcgctttgttgatacgctcgatactgcgggtcttaccaattgcgtgaacggtaacatccagtgctggagactgccccgcaccggttacggcgacacgcagcggcataccaactttacccatacccacttccagctcatccgccgtcgcctgaatagcgtgatgaacgttttcagcggtccagtcagtaatcgcggccagtttgtcacgaaccacttccagcggctgacgcgctaccggacgcagatgttttttcgcggcgtcggcatcgaactcagcaaaatcttcgtagaaataacggcagctctgtgccatctctttcagcgtcttgcagcgttcgcccagcagtttcaccagatcagccagctgcgggccgttacgggtatcgatattttcctgctcaatgtgccactgtaagtgagtagcaacatactccggcggcagcgcgttaatgtagtgatggttcagccacagcagcttgtcggtgttgaacgcactggcagatttgctgacggcattcaaagtgaagtatttgatcatctcttcacgagtgaagatttcctgatcgccgtgggaccagcccagacgcaccagatagttcagcagtgcttctggcaaataaccgtcatcacgatactgcattacgctgactgccccgtgacgtttggacagttttttaccgtcatcgccattgatcatagaaacgtgcgcgtaaaccggcaccggcgctttcagggccttaagaatgttgatctggcgtggcgtgttgttgatatggtcttcgccacggataacgtgggtgatttccatatcccagtcatcgacaaccacacagaagttataggttggggaaccatcggtacggcggataataagatcgtccagttcctggttgctgaactcgatcggaccacggatctgatcgtcaaaaacaacagaaccttcctgcgggttagcaaaacgtacaacacacggttcatcatcagcatgatgctcatggctgtggcggcagcgaccgtcataacgcggcttctcacctttcgccatttgctcttcgcgcagcgcttccaggcgctctttagagcaatagcatttataagcagtgccctcttccagcatctgatcgatcaccgcgttgtagcgatcaaaacgtttggtctggtagtacggaccttcatcccactccaggctcagccagttcatgccatccataatggcttcgatagcttccggcgtggaacgctcaagatcggtgtcttcaatacgcagcacgaactcaccgccgtggttacgtgcaaaaagccaggagtaaagagcagtacgcgcgccgccaacgtgcagatagcctgttgggcttggcgcgaagcgagttttgattttcatgaaatggccttacgtttagaaagatgccgacaaccggcaaatcctggaaaaattaagtgggcgatattctatcactcccgcctgattcctcaatgtagttcgggtttctaccttacgcattattgttttcgttgacaaattgcgcaacacggtctgttttgcgatcatcttgcttaaatttacgacgaacgaacaatttctttagaaaatgcgttgactcattttgaactctccctataatgcgactccacacagcgggggtgattagctcagctgggagagcacctcccttacaaggagggggtcggcggttcgatcccgtcatcacccaccaactactttatgtagtctccgccgtgtagcaagaaattgagaagtgggtgattagctcagctgggagagcacctcccttacaaggagggggtcggcggttcgatcccgtcatcacccaccactttctcgccagctaaatttcttgtaaaaatgtgaagtaccgaagtgggtgattagctcagctgggagagcacctcccttacaaggagggggtcggcggttcgatcccgtcatcacccaccacttcgggtcgttagctcagttggtagagcagttgacttttaatcaattggtcgcaggttcgaatcctgcacgacccaccaatgtaaaaaagcgccctaaaggcgcttttttactatctgcgatactcaaagattcgaacctgcagcaggtttgagttgagcgcagcgaaacaacggagccgctcgtgctggcgacggcccgaagggcgagcgaagcgagtcatcctgcacgacccaccaatgtaaaaaagcgccctaaaggcgcttttttgctatctgcgatttgcgaaattgcctgatgcgcttcacttagcagactactatttccggcaattcctgtctcctcacttactgtgtcaatgcagccaacagcttaaccatcgcgggcgtcacctgctgtgtttcataaacaatatataaatctgcagggatgcgctgtttgagcggacggaaaatgacacctggccagttcatttgtgcgtagctgtccgctatcaatgtgataccaatgcccatactgaccatagcgagtaccgtttgcggttcattaacttcgcgaataacaaccggactaaatcccacctgctggcaaactcgctgcaaaaaatcccagtcagtgtaaacgggcggcattgtaacaaaatactcgtcacgtagcgcttccagcgggacggtggaaaaactactgagatgatgctcttcaggcatcgccaccagaaacgcgctttcatgcaaccgtaagctggtaaaaccagtcggtggttctgtcgccattcgccagatcccggcatcaagttcgcggcgttccagcaaggccatttgcatcgcgggcatcttttcgcgaaaaagaacgtcaacgttaggattttccctgaggaatcgccgcataaccgggcgcatccgtccccacattgccgttcccactacgccgagttcaatccgccctgcttctccccgacctatttgttcaatccgagccaatacattattagcattcaccagcaatcgacggctttcttccatcaagattttgcccgcgtgtgtcagtacgacgctgcggctatggcgaataaaaagctgcgtgccgagttgattttccagctctttaatatgaatgctgagcggaggctgagacatatttaaacgcgctgctgcgcggccaaaatgcaactcttccgctacggcaagaaaataacggagcaacttaagatctgttctgtatacgcgttccataattaagtgctccatataataaatacatcgtattaaattatcatggcataaagtatttcaccaccagatatccgacatacataaacacaatggataatatacccggtaatacatttggtacaggaataggcaagcgcacgattgtaaacaaagcaccaataccaaaaccaacgccggaagaaaataaaatatctttcactaattaacctttatcataaaagcagctctgaagagcagagccgcgaatccttttaatgagtcaccgctcgatgctttatcttttcagggtcatgattatatttaaacccaaagaaaaatatcactgcgagaaaaagagcatatcctgcaaacaccagccagatagtttgccagtcttttacgccatccacgctaaagtaatctactgccatgccactcagaatgctgccaacccatgcgccgacaccatttaccatggtcataaagagcccctgcgcgctggcacgaatgctggaatcaacttcctgttcgacaaatacgctaccagaaatattgaagaaatcgaatgcacagccataaacaatcatgctcagcagcagcaaaataaatccggttgtactcggatcgccataggcgaagaagccaaagcgcagcgtccaggccaccatactcatcagcatgacggttttaatgccaaatcgctttaaaaagaatgggatagtcagtataaagcccacttctgccatctgactaacactcagtaaaatggagggatatttcaccacaaaactgtcagcaaactccgggttacgggcgaaatcatgtaggaacggattaccaaaaacgttggtaatttgcagtaccgcacccagcatcatggcaaagaggaaaaagatggccatgcgtggatttttaaacagcacgaaggcatccagacccagcttgctggcaaggcttgtggtcgcttttttctccgcaaccggaatcttcggcaaagtcagcgcataagcgctcagcagcaaactcgcaccggacgcgatatacagctgcagactactcaattccagatgcagcaggcttactgcccacatcgcgacaatgaaccccaccgtaccaaaaacgcgaatgggcgggaaagcggtcaccgggtcaagccctgcctgggcaagacaggaataagagacgctgttgcttaacgcaatagtcggcataaacgccatcgcattgactaacatcacccaaaacatcatatccggatcagttacggatgccgcataaaaaagtacgcccgcacacaccaggtgacacagcatgtatgcacgttctgcgcgcagccatttgtctgcgatgatccccattataccaggcataataatcgcggcgatccctttggaactgtaaaccatgccaacattagcgccggtgaaatgaagagtattaatcatgtaagagccgagggtaaccagccagctcccccagataaaatattgcaaaaaggacattacctttaagcgcatcgcgatgctcataatcgtttccttgtcgcatcatttggcctcacccgcgaggccgtttcttattgtttttctcaggcaattttgcgcagaaagccacaaataaggttgatgaagttctgcttagagagctccgcagccgccagcgtttgcgcatgactcaatttcacatcgcttaaaccttccgccatattggtaatcgcagagaccgcaacgactttaaggtcgcaatggcgagcactaataacctcaggcaccacagacataccaacaacatccccaccaataatttgcatcatgcgaatttccgccgcagtctcgaaattcggccccggatagctgacgaacacgccctccgtcagagggaaaccctcttctttcgccactttttgtaacagtgcgcggtattccgcatcgtaggcatttgccagactgaagaagcgctctccaaaacgatcatcgttaagacccaccatcggcgtaccgggcatggtgttgatatgatctttcaatgcgaccaggctgcctgcccccacttccggacgcaggctgcctgccgcattggtgcagaacagtagctcgcagcccagcagcttaaaggtacgaattgcgtcagtcataatggtcattccacgaccttcgtagaaatgtccgcgacctttcatacataccaccggtacgccctggagatggcccagcactaactcccccgcatgaccatgtaccgtacttaccgggaagcccggcagcttttcgtaggaaattgcgacagcgttctcaatctgatcggccagcgcgccgagcccggaacctaaaataaaggccactcgtggcgtgaaatcaggtttataagtcttgataatatctatgcaaaacagcgggttatgagaaaattgaacctgagacatacatatcctttttctgtagggtggaatctaacgcctttttatagcgaggttgtcccggctcttaccaatacacttttctcacgcattcaatagcgattcgatatcgatggatttatatcttttctctattaatccacggtaaaaactgtattggcgatattaattcctttgcattaacaatatgtcgtttttagcaaaccactttattaagcaatctactaataacgatcggcatagggaattatgctatgaaaaaacatcttttaactctgacactttcctctatattagcgatacctgttgtatctcatgcagaatttaaaggcggttttgcagatatcggcgtgcattatctggactggaccagccggactaccgaaaaaagcagcaccaaaagtcacaaagatgattttggttatcttgaatttgaaggtggcgctaactttagttggggagaaatgtacgggttcttcgactgggaaaacttctataacggtcgccataataaaccaggtagcgagcagcgttatacctttaaaaataccaaccgtatttacctgggtgacaccggatttaatctctacttgcatgcgtatggcacctacggttctgcgaatcgcgtgaatttccacgacgatatgttcctgtacggtatcggctacaatttcaccggcagcggttggtggttcaaaccgttctttgctaagcgttatacagatcaaacctattacactggcgacaacggctatgtcgccggctgggttgcaggttacaactttatgctgggcagcgagaaattcactcttaccaactggaacgagtacgagtttgaccgtgacgctacctatgcagcgggtaatggcggtaaagaagggctgaatggcgcagttgcactgtggtggaatgcaacaagtcacattactacggggattcagtatcgatatgcggatgacaaactgggcgaagatttttaccaggatgcgataatctactccatcaaatttaacttctgattgattactgccggggctcccggcagtatgaattcactttatatctgatacaacggatccccttcccgcccagccattagcgcattgccctggtctcgtaccacgtcccataaagcttcagcggcggtggaaagactacggttcttcctgcgcaccagcatcaactggcgttcaacaaccggcgtaatgcgctttaccaccagtgggctaccttcaggcaatggtagcgccagtgcgggaagaatactgatgccgatgcctgcggctaccatcgggaacagcgtcgccggatgtccaatctcctgcacaatattcgcctgaataccattgcgcgccagcgctgcgtcaatcagcggtcggctgccactcgcgtaatcctgcaacaccaatttcgctccctgtaatgcctgccagggtacataatcttccacggccaaagcgctatcgcgatggcaaagcagaaagaaaggctcggaaagaatcgcttcacattgcagatcgcccactgggcctggatcgatgacgatgccaaaatcgacatctccctggcgaatactttccattacccactgctgcggacgatcgtgcaggacaaactgaatatctggatagcggcgatggctttcagcaatgcattgcggaataagatgcgcggaaatggtctggctggcagcgacccgaacttttccgctcagttgttgccccatacgcccggtatcgcgcaacgtgctgttcagttcatccagcagtcgctcaagacgcaaagccagctgctgccctgcatctgtaagcaccacttcacgcgtggttctgtccagcaggcgaacaccagtatgattttccagttccttcacactgtgactcactgcgctctggctcaggccgatacgctctcctgcacgactaaaacttttctcctgcgctactgtgacgaaaacctttaattgttttaaagaataattcatctgttttcttcatgaatggatgcaataaatcaattttatttctcaaactggaagaagcacaatagaaccatcgatcatctggagtctttatgaaactttttcgtatcctcgatcctttcaccttaaccctgatcacggtggtgttgctggcctctttctttccggccagaggcgatttcgtccccttctttgaaaatctgaccaccgcagctattgccctgctgttctttatgcacggcgcgaagttgagccgtgaggcgattattgctggcggtggtcactggcgactgcatttgtgggtaatgtgcagcaccttcgtgctgtttccgattctgggtgtactgtttgcctggtggaaaccggtaaatgtcgacccgatgctctactccggttttctctacttgtgcattctcccggctaccgtgcagtctgcaatcgccttcacgagtatggcgggcggtaacgtcgcggcagcggtttgttctgcgagcgcatccagcctgctggggattttccttagtccattgctggttggtctggtgatgaatgttcacggtgcagggggcagccttgagcaggtcggtaaaattatgctgcaactgctgctgccgtttgtgttggggcatctttcccggccgtggattggtgactgggtgagccgcaataaaaaatggattgcgaaaactgaccagacgtccattctgttggtggtttatacagcgttcagcgaagccgtcgttaatggtatctggcataaagttggctggggaagtttgctgtttatcgtggtggtcagctgcgttcttctggctatcgtgattgtagttaacgtctttatggcacgccgactgagcttcaataaggcagatgaaattactatcgtcttttgtggtagcaaaaagagtctggcaaatggcatcccgatggcaaacattctgttccccacaagcgtgatcggtatgatggtgctgcccctgatgattttccatcagatccaattgatggtctgtgcggtgctggcgcgtcgatacaaacgccagaccgaacagttacaggcgcagcaggaaagcagcgccgataaagcttaaagcggacgcttcaggggctggaccagttgcgtcagcccctcggttttaatcagcagcgtgatttgcattagctcaccgagcttccctgccgggaactcatctttgcgggcaaaccacagcagatactcctccggcaggtcgattaagcgacgccctttgtatttgccaaacggcattatcgtattggctatttcaatcagctgctctttttccatctcagctacccagcaaacgcagcatttccgcttcgtcgatgacttcaatgcccagttcctgcgccttcgccagtttagatcctgcagcttcacccgctatcaccagatcggttttcttgctcacgctgcccgcgactttcgcgcccagttcgaccagtcgagctttagcgtcatcacggctcatctggcttaagctgcccgtaagcaccacggttttaccagcaaacgggctgtcaatctcttccgcgttgataacgatcggcgcaggccagtgaacaccttccgccaacagctcgctgatgacattgcggttgctttcttcggcaaagaagttgtgaacgtgggatgcaacgacaatgccaacatcaggcaccttttgcagctcttcaatgctagcggcttccagcgcttccagcgtgccgaaatatgccgccagacctgctgcggtggcctcgccgacttcacggatgccaagtgcatagaggaagcgagcaaaggtggtttctttcgctttttccagcgcgttaaccacgttttgtgcgctttttggccccatacgctccagtccggtcagtttgcctgcggtgagtttgaacagatctgccggagtatggacatattctttttcaaccagctgatcgatgattttgtcgcccattccgtcaacatccatcgcacggcgggaaacaaagtgtttcaggctctctttacgctgcgcaccgcaaatcaggccaccggtacagcgggcaaccgcttcaccttccacacgctcaacgtcagaaccacataccggacaatgcgtcgggaatacaacctcacgggtatcttccgggcgttcagaaagcacgacgttaaccacctgcgggatcacgtcgccagcgcggcgaatcaccactttatcgccaatgcgtaaaccaagacgttcgatttcatccgcattgtgtaaggttgcgttactcaccagcacgcctgcaacatggacaggttccagacgcgcaacaggcgtaatcgcgccagtacgcccaacctgaaactcgacgtcacgcacaaaggtcatctgctcctgcgccgggaatttaaacgctaccgcccagcgcggggcacgcgcgacaaagccaagctgctcctgctgtgccagactgttgaccttaatcaccacgccgtcgatatcaaagcccagcgtcgggcggtcttcttccactttgtgatagaacgccagcacttcttccgcgctttcacaaagcgttacccgatcgctgaccggcaacccccactttttaaattgcagtaaacggccaagatgagtatccggcagctcgccaccttccagaacaccaacgccatagcagaaaaaagtgagcggtcgcttcgctgtaatacgcggatcaagctgacgcagactaccagctgccgcattacgtgggttagcaaacactttcccgcccgtgcgtcgcgcatcttcgttaatcttttcgaaccccgcctgcggcaggaacacttcaccacgcacttccagacgcgccgggatattctctccgtgcagcttcagcggaatggcgcgaatagtacgcacattagacgtgatatcttccccggtggtgccatcgccacgggtcgcggcactgactaaaacgccattttcatacagaatactgacggcaagaccatccagcttcagctcacagcaccaggtgactttctcgttgtttttcagacggtcctgcacacgtttgttgaaagcaagaaagctttcttcatcaaaaacgttatccagactcagcattggtacttcatggcgtatctggctgaaagccgccagcggcgcagcgcctacacgttgagtagggctatcaggcgtaatcagttctggatgtttggtttccagctcgcgcagttcgcgcatcagcctgtcgtattcagcgtcgggaatttccggcgcatccatcacatgataaagatattcatgatggcgaagcgtcgttcgcagttctgtcagttgttgttcgatactttccatatcgcaccatcaatgctaaaaacccccgacaagcgggggttcgaagaggagttaatttgccttaagtgtatcaggcgttggcgtctttgacttcgcggatgatgtcctggtactcgcgcaatttctgcggagtcatcatacggcgctgatcgtcaagcacgacaccgcccacttcatcggcaatatgctgcgcagattgcagcatcagcttgaagttctgcagctcgtcaccgtaagacggtacctgcataaagatagtgacacccggagtagtgaaatccttcatttcaggatcaaaggttcccggtttcaccatattcgccaggctgaataacgccgggccgctgccatccgggctaagatgacgatggtaaatattcatatcgccaaaaatgaagcccgcttgttgaatgctgttaagaagcagttcaccgtttagctcgctaccgtgatgcgccgcgacgttcatgataatcaccgcttctttgcgcttcggtttatccataactggagcaggttccgctacaggctcaggctgtggtgccgctacgggttctgcaggctggaaagcctgttgtgccggttgcggtgcactatgcacaggctgcggcgctggcgcgacctgtgggctaactggctgctgcaacggctgttcaggctgcggctgataggcaggctgctgcaccggctgcgctggatgcggagcatgttgcggcggtacctgcgcttcaggcggctgctggaccggttgacgcggctgcgcagacgcataaggcggttggtactggtgttgcgggctcggacgagcagcctcatgctcctgagcgttagccggggcatgattcacgcggtgaacacgaacctcaccaacgccctcatcatcttcgacatcctcgtcataagaatcgtcgtcacgtttactcttcattcgttttaatggccgatcgcggaacatagaagatcgttctttacggctggtccagaaaccatgtaccagtaaagcgattatggcgatcgcgccaacaatgattaatatcagacgcaaatcctgcatcattatattctctgttgttctaacaccttgccaccacggcaaacatttactcactaagagtatttgccgattacctcaagtgcaagtgcactattaactttcacagcacaaagatagatgaaatcgtgctttttgctgttttttcgaacatatcctaactgtccattgcgcaattacccggtaaaatacgcagaattttcctgggattggtcaaaaggagctcatcctgattatggttagtagtttcacatctgccccacgcagcggtttttactattttgcgcaaggctggaagctcgtcagccaacctgggattcggcgtttcgttattttaccgctgctggtcaatattttgttgatggggggcgcattctggtggctctttacacagctcgatgtctggatcccgactctcatgagttacgttccggactggctacaatggctgagttatctgttgtggcctctggctgtcatctctgtgctgttagtgtttggctatttcttctccacgattgctaactggattgccgctccgtttaacggtttattggctgaacaactggaagcacgattgactggcgctacaccgccagataccgggattttcggtatcatgaaagatgtgccgcgaatcatgaaacgcgaatggcaaaaatttgcctggtatctgccgcgcgcaattgtattactaattctttacttcatccctggtattgggcaaaccgtcgcgccggtactgtggttcctgtttagcgcctggatgttagccatccagtattgcgattaccccttcgataaccacaaagtgccgtttaaagagatgcgcaccgccctgcgcacacgcaaaatcaccaatatgcagtttggtgctttaaccagcctgtttacgatgatcccgctgcttaatctgttcatcatgcccgttgccgtttgtggcgcgacggcgatgtgggtcgattgctatcgcgataaacacgcgatgtggcggtaacaatctaccggttattttgtaaaccgtttgtgtgaaacaggggtggcttatgccgccccttattccatcttgcatgtcattatttcccttctgtatatagatatgctaaatccttacttccgcatattctctgagcgggtatgctacctgttgtatcccaatttcatacagttaaggacaggccatgagtaagatttttgaagataacagcctgactatcggtcacacgccgctggttcgcctgaatcgcatcggtaacggacgcattctggcgaaggtggaatctcgtaaccccagcttcagcgttaagtgccgtatcggtgccaacatgatttgggatgccgaaaagcgcggcgtgctgaaaccaggcgttgaactggttgaaccgaccagcggtaataccgggattgcactggcctatgtagctgccgctcgcggttacaaactcaccctgaccatgccagaaaccatgagtattgaacgccgcaagctgctgaaagcgttaggtgcaaacctggtgctgacggaaggtgctaaaggcatgaaaggcgcaatccaaaaagcagaagaaattgtcgccagcaatccagagaaatacctgctgctgcaacaattcagcaatccggcaaaccctgaaattcacgaaaagaccaccggtccggagatatgggaagataccgacggtcaggttgatgtatttattgctggcgttgggactggcggtacgctgactggcgtcagccgctacattaaaggcaccaaaggcaagaccgatcttatctctgtcgccgttgagccaaccgattctccagttatcgcccaggcgctggcaggtgaagagattaaacctggcccgcataaaattcagggtattggcgctggttttatcccggctaacctcgatctcaagctggtcgataaagtcattggcatcaccaatgaagaagcgatttctaccgcgcgtcgtctgatggaagaagaaggtattcttgcaggtatctcttctggagcagctgttgccgcggcgttgaaactacaagaagatgaaagctttaccaacaagaatattgtggttattctaccaagtagcggtgagcgttatttaagcaccgcattgtttgccgatctcttcactgagaaagaattgcaacagtaatgccagcttgttaaaaatgcgtaaaaaagcacctttttaggtgcttttttgtggcctgcttcaaactttcgcccctcctggcattgattcagcctgtcggaactggtatttaaccagactaattattttgatgcgcgaaattaatcgttacaggaaaagccaaagctgaatcgattttatgatttggttcaattcttcctttagcggcataatgtttaatgacgtacgaaacgtcagcggtcaacacccgccagcaatggactgtattgcgctcttcgtgcgtcgcgtctgttaaaaactggcgctaacaatacaggctaaagtcgaaccgccaggctagactttagttccacaacactaaacctataagttggggaaatacaatgttccagcaagaagttaccattaccgctccgaacggtctgcacacccgccctgctgcccagtttgtaaaagaagctaagggcttcacttctgaaattactgtgacttccaacggcaaaagcgccagcgcgaaaagcctgtttaaactgcagactctgggcctgactcaaggtaccgttgtgactatctccgcagaaggcgaagacgagcagaaagcggttgaacatctggttaaactgatggcggaactcgagtaatttcccgggttcttttaaaaatcagtcacaagtaaggtagggttatgattagtggcattttagcatccccgggtatcgctttcggtaaagctctgcttctgaaagaagacgaaattgtcattgaccggaaaaaaatttctgccgaccaggttgatcaggaagttgaacgttttctgagcggtcgtgccaaggcaagtgcccagctggaaacgatcaaaacgaaagctggtgaaacgttcggtgaagaaaaagaagccatctttgaagggcatattatgctgctcgaagatgaggagctggagcaggaaatcatagccctgattaaagataagcacatgacagctgacgcagctgctcatgaagttatcgaaggtcaggcttctgccctggaagagctggatgatgaatacctgaaagaacgtgcggctgacgtacgtgatatcggtaagcgcctgctgcgcaacatcctgggcctgaagattatcgacctgagcgccattcaggatgaagtcattctggttgccgctgacctgacgccgtccgaaaccgcacagctgaacctgaagaaggtgctgggtttcatcaccgacgcgggtggccgtacttcccacacctctatcatggcgcgttctctggaactacctgctatcgtgggtaccggtagcgtcacctctcaggtgaaaaatgacgactatctgattctggatgccgtaaataatcaggtttacgtcaatccaaccaacgaagttattgataaaatgcgcgctgttcaggagcaagtggcttctgaaaaagcagagcttgctaaactgaaagatctgccagctattacgctggacggtcaccaggtagaagtatgcgctaacattggtacggttcgtgacgttgaaggtgcagagcgtaacggcgctgaaggcgttggtctgtatcgtactgagttcctgttcatggaccgcgacgcactgcccactgaagaagaacagtttgctgcttacaaagcagtggctgaagcgtgtggcagccaagcggttatcgttcgtaccatggacatcggcggcgacaaagagctgccatacatgaacttcccgaaagaagagaacccgttcctcggctggcgcgctatccgtatcgcgatggatcgtagagagatcctgcgcgatcagctccgcgctatcctgcgtgccagcgctttcggtaaattgcgcattatgttcccgatgatcatctctgttgaagaagtgcgtgcactgcgcaaagagatcgaaatctacaaacaggaactgcgcgacgaaggtaaagcgtttgacgagagtattgaaatcggcgtaatggtggaaacaccggctgccgcaacaattgcacgtcatttagccaaagaagttgatttctttagtatcggcaccaatgatttaacgcagtacactctggcagttgaccgtggtaatgatatgattagtcacctttaccagccaatgagtccgtccgtgctgaacttgatcaagcaagttattgatgcttctcatgctgaaggcaaatggactggcatgtgtggtgagcttgctggcgatgaacgtgctacacttctgttgctggggatgggtctggacgaattctctatgagcgccatttctatcccgcgcattaagaagattatccgtaacacgaacttcgaagatgcgaaggtgttagcagagcaggctcttgctcaaccgacaacggacgagttaatgacgctggttaacaagttcattgaagaaaaaacaatctgctaatccacgagatgcggcccaatttactgcttaggagaagatcatgggtttgttcgataaactgaaatctctggtttccgacgacaagaaggataccggaactattgagatcattgctccgctctctggcgagatcgtcaatatcgaagacgtgccggatgtcgtttttgcggaaaaaatcgttggtgatggtattgctatcaaaccaacgggtaacaaaatggtcgcgccagtagacggcaccattggtaaaatctttgaaaccaaccacgcattctctatcgaatctgatagcggcgttgaactgttcgtccacttcggtatcgacaccgttgaactgaaaggcgaaggcttcaagcgtattgctgaagaaggtcagcgcgtgaaagttggcgatactgtcattgaatttgatctgccgctgctggaagagaaagccaagtctaccctgactccggttgttatctccaacatggacgaaatcaaagaactgatcaaactgtccggtagcgtaaccgtgggtgaaaccccggttatccgcatcaagaagtaattcttgccgcagtgaaaaatggcgcccatcggcgccatttttttatgcttccgccagcggcggcaaaatcaattcatcgctctcatgctgctgggtgtagcgcatcacttccagtacgcgcaaccccgctcggtgcactgcatcggttaacgccttccctttcagcaagccactgatgagctgagcacaaaacaggtcgccagtccctttcaggtcggtttttacccgactatgggaaatgacattcacgctgtcggcagtgaccaccacaacctgcatctcctgattttcttcattaccggaggcgctggtaaccaccacccattttaatgtgtcactaagcagactttttgcggcagcaatggcactgtcgagatcgcggcaatttttaccggtcaggatttccaactcaaagatattgggggtaattccctgcgccagcggcagtaaatattgtcgatacgcttcgggaaggtcaggtttgacataaattccgctatcaatatcgccaatcaccggatcgaccatgatcaataggtcaggatggtctttgcgtagcgcagtcagccactcggcaaggattttgatttggcttgccgttcccatatagcccgtggttacagcacgaagttggcgcagcgcatcacgctcctgaagcgcacgcaaatagccgctaaaccattcgtccggaatcgcaccaccgtagaaagtgtcataatgcggcgtattgctcagcaataccgtcggcacggcaaagacattcaggccgttctgtttgatagcaggcacggcaatgctgttgcccacgctgccgtaaaccacctggctctgcacggcgacgatatccgcctgcagtgccctactcttatcgttaaacaacaacaaactactcatttaattttttctccttgccgatgatcctcatcgtaatccaaccgaaactttacctgattctggcagtcaaatcggctatcacaaaacaaggataaggtaattcaatgaagaaaatcatttgtctggtcattacactactaatgacactccccgtttacgcgaagttaactgcccatgaagaagcccgcatcaacgccatgctggagggattagcacagaaaaaggatttgatatttgtgcgcaacggtgatgaacatacctgctatgaagcggtttctcatctgcgtctgaagctcggcaatacccgtaaccgcattgacactgccgagcagtttattgataaggttgctagcagcagtagcattactgggaagccgtatattgtgaagatccccggtaagagcgatgagaacgcacagccttttttacatgcgttaattgcgcagacggataaaacggtgcctgcggaaggaaattaatccgctttgggaaggcatttacaggaggtaacatgaaaaaacgctttatttatcacgatgaaaaaagcaataaattttggtggatagattacgaaggggatagtttagctgtcaactatggcaaggtaggtagtattggtaaattccagacaaaagagttcgataatgaagaacagtgtctgaaagaagccagtaaattgattgccgcaaaaatgaagaaaggctatcaagaagatccaaagtttaacttcatggatcgctactattttgatgatgaagaaattgggttacatgttaaaacgagtcacccaaacttccagtgccattttactgatccactttatatgtgttgctgggatgaagaatctccttttggcagcgatgaaggtgctgatgctctaaacgttcttgaaaatagcctccgtaaagagccggatctggactgtgctgatttccctcaaatgttaattgaaactatgtggggtatgaaatacatcgctatggacagtattcttgaagaggatgttcgtgcgcaattactagtcgatgaaatgagcactatccagagcaatatgattacctacgcaactgcattcggtcagattaaagtcatgggtaaaatctcccataaacttaaaaagatgggactcaatgcactagcgcgtcatcagcttaccgcaaaaattcttcaatggggtgacggtcaggacagtccaatacttcaaaaaatgattgatgaccttacggcgtttcctcacgaaaattaaatactgcatttgtcggcagcaacaactgttaaaaaagtgcgctttgtttatgccggatgcggcgtaaacgccttatccggcctacaaaatcgtgctaattcaatatattgcagaaaccttgtaggcctgataagcgtagcgcatcaggcagttttgcgtttgtcatcagtctccgatgctattaatccttaaatccccgccccctggctaaaatgctcttccccaaacaccccggtagaaaggtagcgatcgccacgatcgcagatgatcgccaccaccaccgcgtcagggttagcttttgccacccgcagtgctccggcaaccgcgccgccggagctgacgccacagaatattccttcccgcaccgccagttcgcgcatggtgttttccgcatcgcgctgatgaatatccagcacctcatccaccagagaagcgttgaaaatccccggcagatattccgtaggccagcggcgaatgccgggaatgctgctgccctcttccggttgcaggccgacaatggtcaccggtttggattgttcgcgcataaagcgactgacgccggtgatagtgccggtcgtccccatgctggagacaaaatgagtgatgcgcccgccggtttgctgccagatttccggcccagtggtggtgtaatgcgcataagggttatcgggattattgaactgatcgagcagctttccttcgccacgattcgccatctccagcgccagatcgcgcgcaccttccatgccctgctctttggtgacaagaatcagttccgcaccataagcacgcatcgccgcacggcgttcctggctcatgttgtcgggcatcagcaatttcatgcgatagcctttcagcgcggcaatcattgccagcgcaatgccggtgttaccactggtggcttcgattaagacatcacccggtttaatttccccgcgcttttccgcctcgacgatcatgctaagtgccgcacgatctttcacgctacctgccgggttattgccttccagttttaaccacacttcactgccgttatccggccccattcgctgcaacttcaccagaggcgtattgcctattgtttgttctaatgtactcacgatctctatccatacgtggtgttgcctgatgcgacgcttgcgcgtcttatcaggtctacaggttacaaaccttgccattaaaaagcccggatcgcgggaagcgcctccgggcgtttaacattcactcaacctatcaggcgctttgtgcgagagcaagttcctcatcgcgggtttcgatacgctcgtcgccgttatacagccgcgcatgttgcagaccaacgaataaacgctcgccacgctgcggggcatcgtcgccatgcatcacgaccgtcagcggttcgttgtaccaccccagcggctgcaccactaattgggtgtagtgacctttcgggctggcttccagtacctgtaccggcagcgggctatcgaggctggtacggcggctgatatccacttcccaagggcgcaggaagagatccaccggcccctgatacgcaggtgtgtagcccagcggccagcgatgcgcgccaacatggaactgcccgccgcgaatggttccctgcaggcggttcacttcgcccataaattcgagcacaaaacgggtcgccggttcgcgccatacctgatccggcgcgtcagcctgttcaatattgccctggctcatcacaactacacgatcagctacttcggtcgcttcttcctgatcgtgggtcacaaaaacgctggtgaattttagttcttcatggagttgacgcagccagcgacgcagctctttacgcacctgcgcatccagcgcgccaaacggttcatcaagcagcagaatttgcggttccacagccagcgcgcgcgccagcgccacgcgctgtttctggccgccggaaagctgcgccggataacgatccgccagatgggcaagctggaccatttccagcaattttgtcactttcgctttgatggctgcggcattcgggcgctcgcgacgcggcagcaccgtcaggccaaaagcgatattgtcgaacaccgtcatatggcggaacagcgcgtaatgctggaacacgaaaccgactttacgatcacgtgcgtgcaggcggctcacgtcggtgccgtggaagcgaatatgcccgctggtttgatgctccagcccggcgataatgcgcagcagcgtggttttcccggaaccggacggccccagcaacgcgaccatctgaccactaggaatatccagactgatatcgttcagcacctgggtgcgaccaaagctcttcttaatattggcaatctcaatgctcatgatgttcctcctgctgtgcgcgtttttcctgattctccaggcgccactgcaacatactttttaaaaacagggtgataatcgccatcagcgttaacagcgccgcagcggtaaaggagccgacggtgttgtagtcctgctccagcaattcaatctgtaacggcaggctcagggtttcgccgcgaatgctgccggaaaccacgctcaccgcgccaaactcgccaattgcgcgggcgttggtcaacaccacgccataaagcagcgcccagcggatgttcggtaatgtgacgcgacggaacatctgccagccggacgcgccaagcaaaatcgccgcttcgtcttcctggctgccctggcttaacatcaccggcaccagttcgcgcaccacaaacggacacgtcacgaagatggtgaccagcaccattcccggccaggagaacataatttgcaggttatgctcgtcgagccaaccgccgagcgggccgttagagccgtagaacagcaaatacaccagaccggcaaccaccgggcttacggcaaacggaatgtccagtagcgtcagcagtaactggcgtccagggaagttaaagcgcgtcaccagccaggccagcagaatgccgaacaccaggtttaccggtacggcaatcagcgcgatcatcaccgtcagccagatggcgtgcagcatgtccggatcggccagattctgtaaaaccggcatcagccccttgctgaatgcctgcacgaagatgtaaatcatcggcaccagcaggatgaacgcgctaaccagcatcccgatgccaatcagaaaccatttgccccagttaatcgggcgcgcgtcataacgcttcaattgggtaacttccgccattaatgacctaccacacgccgaccaaagcgactttgcagagtgttaatactgaacagcagcagcagagatgccgcgaggatcacgctagcaatcgcgctcgctgccgggtaatcaaactcctgtaagcgcacaaaaatcatcaggctcgtcacttccgtcttccacgcgatatttccggcgataaaaatcaccgcgccaaattcaccaagactacgggtaaagctcagcgccacgcccgccaccagcgccggagaaagctccggcagcaccactttgcagaaactctgccagcgcgttgcaccaagcgtttccgccgcttcttcatattccgggcctaactcttccagcaccggctgcacggtacgcaccacaaacggaatgctggtaaaggccatagccaccgcaatccccagccatgtataggtgactttgatatcaaacttcgccagccattcaccgtaaaaaccgtttacggaaaagaggctggccagcgttaaaccggcgacagccgttggcagcgcaaagggtaaatccatcagcgcatcaagcagcgtgcggcctgggaagcgatagcgggttaggatccacgccatcagcagaccgaaaacgccgttaaaaatgcttgccacaaacgcgctcagcagcgttactttgtaggccgcgaccacctgcgggttggtgatcacctcccagtactgcgcccagctcatctgggccagttgcatcaccagcgcggagagcggcagcagcaaaatcaggcacacaaacagcagactggtgccgaggcttaaggtaaagcccggcagcacgcgtctggaggagacagcaaacatcagttacgccccgccgctaacagcttgtctaactcgccgccgctggtgaagtgggttttcatcacttccggccaggagccaaatttgtcttccacgcggaacagctcggtctgcgggaatttgtctttcagtttgtccatcacctccgggttattcacgcggtagtaatagtcggtgatgatggtttgcgcctgcgggctatagagccagttcagataggctttggcggctttttccgtaccgttggcctgcacgtttttatcaacccacgccaccgggaattccgccagaatgttggttttcggaatcaccacttcaaagccctgcgcttcatactgtttacggatgttgttcacttcgctttcgaagctaatcagcacatcgcccaggccgcgctcggcaaaagtggtggtcgcgccacgaccgccagtatcgaacacttcaacgtttttcaggaactgggtcataaactgttcggttttgcctttgtcaccaccgtcagctttatccgctgcgccccatgccgccagataggtataacgcgcgttaccgctcgttttcgggttcgggaaaatcagcttcacgtcggagcgcaccaggtcgttccaatcgtggatattcttcgggttacccttacgcaccaggaagcccatggtggagtagaacgggctgctattattcggcaggcggctctgccagtcggccgggatcagcttgcctttatcgtgcaggatttgtacgtcggtcacctggttataagtgacaacgtcggcttttaagccctgtaaaatcgccagcgcctgtttactactcccggcatgagattgttttatcgtcagtttgtcgccgccgttatcttttgcccattgttgctcaaacggcggattcagggcggcaaacagctcgcgggagacgtcataagaactgttcagcagttccgttgcctgtacatggcccgccagcagcagagaagcgaccagcgcgagactgttctttttcagtaagttaacggccattgcgcacccttataaatttaatgactttctaatagccatcatatttataacggacgtgaaaggagtaacggttttatataccgtttggtgatttggaagttgaaaagggaataagaacttggttcaacaggcgtaattgttgcagtcagtttggacacgaacagcgcggagaaaccggagcgtacacatagtacgtgaggatttcgagcactgcccggggccaaaatgacaaataaaatagcctggtgaacttagttcaagacgaaatcctccccacaaatgcagggaggaaacagaggtgaatcagataccgacgctaaccgtctccggcagtgtgctgccgccatcaatcacattctgtgtaccggttaaatagctggattcatcgcttgcgaggaaggccgccagttcgccgacttccagcggatcggcgaggcgacgcatcgggattgctttcgccatttcagtcagcacgctctctggatcttccgggttgctctggcgggcaatgctttccgccattggtgtgcgcacgtatcccgggcaaatggcgttaacgcgaataccagactgcgcgtactccaccgccaggctttttgtcaggccaacaatcgccgctttcgttaaggcgtacgccgtttcgccaggatcggccaccatatcaccagtgacactagacatcatcacaatgcgaccatctttgcgggcaatcatctccggcagcaccgccttcgtgacgttccatacgcctttaatattgatgtcaatatggaaatcgcgatcgtcatcgctcatatcgaggaaactgcccagacgacaaacgcctgcgttattcaccaggatatcaatgcgcccttctttttccttcgcgcgtttgatagctgcggctacgctcgccgggtcacgcacatcggcgacaaccgccgtacagcgatgaccacgaccacacagttcgtccgccagcttttcgatctcaggggagatatccagcaagattaggttcgcgccatgacgtgcaaaagttctggcaattccttcgccaattccctgcaatgcgcccgtaatcagtgctgtcttgcccgtgagtttacccattttaatgctctccttgttaatacagagcgttacactccattccctctgaaaatacaggataaacaaaatattgctgcggatcagctcactaattcaggaaaatctcaatccagtcgctgctttatgcatcatttcaggcgttgtgttagctcactgctgcgctgaatcattttcaaactctccacatcattgagttgcacaaggccaacaaacagtaaatcggtaacagaattttgcgccgtgcgggtagacatgctgctgctacgccattcggtttctccggaaacggtatcgagggtgaaatgcgccagccgccgcagcggagagtcagtcagagaagtaatggcaatcaccgttgccccctgctttcgtgccgcttctgcgcacaagacaatctcttttttactgccgctgtaagagatagcgatttgtacatcgccttttttcaacgcctgagaaacggtggcttgtacgtgcgtgtcggcttcgcaggccacgcgatagccaattttcatcagtttgaagctcagatcgcgccccaccagcgcgcttccgcccaggcccgttatctggataaacggtgctttactgatgacctcaatgattttttgcagccgcgcgtaatcgagcaacgcgcaggtttgctccagcgccagctctttttcgcgattcagtttgcgcgcgatcacttccaggctatcatcactggtaatgctactgtgcaggtgcagtgccgtggcattcgttttctcccggctggcactgtattcgcctattaacgccatacgcaattcagtaaatccttgcgcgccgagtttttgggcaaatttcactatgctgctctggctaatgccgagctgtttcgccatctgccgactagaaacggattgcagctcactcacgttggcctgcagaaagtcagcgattttttgctcgttttcggtgaattcactccccgcattgcttattttcgtcaggtacaacatcttccactctcctgggctggcagcataaattccgcttaagttcttatgacgctcttcacactctgcgagtgtagactcaatgattcctttaagcctgtcaattcgggatatatgattccatacatctgcaattatttgatcgtaaatagtaaggtcaccaccgatgcaatttgaaaagatgattactgaaggcagcaacaccgccagcgctgaaattgaccgcgtaagcacgctggaaatgtgccggattatcaacgatgaagataaaaccgtaccgcttgccgttgagcgcgtactgccggatatcgccgcggcgatcgatgttatccacgcccaggtaagcggcggcgggcgtctgatttacctcggtgcgggaacatccggtcgtctggggattctggatgccagcgaatgtccgcccacctacggcgtgaaaccgggtctggtggttggtttgattgctggcggcgaatatgccattcagcacgcggtggaaggcgcggaagatagccgggaaggcggtgttaatgatctgaaaaatattaatttaacggcacaggatgtggtggttggcattgctgccagcggtcgcacgccgtatgtgattgccggactggaatacgcacgccagctcggctgccgcacagtgggaatttcctgtaatccggggagcgccgttagtaccaccgctgagtttgccattacaccgattgtaggtgccgaagttgttaccggttctagccggatgaaagcaggtacagcgcagaaactggtgctcaatatgctttccaccgggctgatgattaaatccggcaaagtgttcggcaacctgatggtcgatgtggtcgccaccaacgaaaaactgcatgtgcgacaggtcaatattgttaaaaacgccaccggatgtagcgcagagcaagcggaagcggcgttaattgcttgcgagcgcaactgtaaaacggccattgtgatggtgctgaaaaatctcgatgccgcagaagctaaaaaacgcctggatcaacacggcggctttattcgtcaggttttagacaaggaataacccatggccaaagagatcagcagtgaacttctgaacaccattcttacccgtgtcggcggaccgggaaatatcgccagttgtggtaactgtatgacgcgcctgcgtctgggtgtacatgacagtagtctggttgatcccaatatcaaaacgctggaaggcgtgaagggcgtcattttgaccagcgaccaggtgcaggtcgtttttgggcctggtaaagcgcatcgtgccgcaaaagcgatgagcgagctgctgggagaagcaccggtacaggatgccgcagaaatcgccgcccagaacaaacgtcagttaaaagccaaacaaacctccggcgtgcaacaatttctcgccaaattcgccaccatcttcacgccgctgatccccggttttattgccgccggtctgctgctggggatagcgacgttaattgccacggtgatgcacgttccggcagatgctcagggaacactacccgatgcgctgaattttatgaaggtgttcagcaaaggtttgttcactttcctggtgattctggtgggctataacgccgcccaggcatttggcggcacgggcgtaaatggcgcaattatcgccgcgctctttttgctcggttataaccccgcagcgaccaccggttactacgccggttttcacgatttctttggtctgcccatcgatccgcgcggcaatattatcggcgtgctgattgccgcgtgggcctgcgcccgcattgaaggcatggtgcgccgctttatgccggacgatctcgacatgctgctgaccagcttaatcaccctgctgatcaccgctacgcttgcgtacctgatcattatgccgctgggtggctggttattcgaaggtatgagttggctgtttatgcacctgaacagtaatccgttcggttgtgcggttttagccgggctgttcctgatcgccgtggtatttggcgtgcatcagggctttattcctgtttacctcgcgttaatggacagccagggattcaacagcttatttcccatccttagtatggcaggcgcgggccaggtgggcgcggcgctggcactctactggcgggcgcaaccgcacagtgcgctacgcagtcaggtacgcggggcgattattcccggcctgctgggcgttggtgaaccgctgatttacggtgtcaccctgccccgcatgaagccgtttgttaccgcctgtttaggcggcgcggcgggcggtttgtttatcggcctgatagcctggtggggtctgccgatgggcttaaacagcgcctttgggccgtctggtctggtagcgctgccgctgatgacttccgcacaaggcatccttccggccatggcggtttatgctggcgggattctggtggcatgggtttgcgggtttattttcaccacgctctttggctgccgtaacgtcaatctggactgatatcatgaaacggacaatgctctatctttctctgctggctgttagttgtagcgtcagcgccgcaaaataccctgttctgacagaaagcagcccagagaaagcagggtttaacgtcgaacggcttaaccagatggatcgctggattagccagcaagttgatgtcggttatcccagcgtaaacctgctgatcattaaagataatcagattgtgtatcgcaaagcctggggagcggcgaaaaagtacgatggcagcgtgttgatggaacagcctgtcaaagccaccaccgggacgctgtatgacctggccagtaacaccaaaatgtacgccacgaacttcgccctgcaaaagctgatgagcgaaggcaaactgcatcctgacgatcggattgcgaaatatattccggggtttgccgatagtccaaatgacaccattaaaggcaaaaacaccctgcggatttctgacctgctgcatcacagcggcggtttcccggcagatccgcaatacccgaataaagcggtcgcgggcgcgttatattcccaggataaaggccagacgctggagatgatcaagcgcacgccgctggaatatcagcccggcagcaaacatatctacagcgatgtcgattatatgctgcttggatttatcgtcgagagcgttaccggtcagccgcttgaccgctatgttgaagagagcatttatcgcccgctcggcctgacacatacggtatttaacccgctgctgaaaggctttaaaccgcaacaaattgccgccacggaattgaacggcaatacccgcgatggcgtgatccatttcccgaatatccgcacctccactctctggggtcaggtgcacgatgaaaaagccttttatagcatgggcggcgtttccgggcacgcaggtttgttttccaataccggcgatattgcggtgttaatgcaaacgatgctgaacggcgggggctatggtgatgtgcagctgttcaatgcggaaacggtgaagatgttcaccaccagctctaaggaagatgccacttttggcctcggctggcgcgtgaatggtaatgccaccatgacgccgacgtttggcacgctggcaagcccgcaaacctacggtcacactggctggaccggaacggtgaccgttatcgatccggtgaatcatatgacgattgtgatgttaagcaacaagccacatagcccggttgccgatccgcaaaagaatcccaatatgttcgaaagcggtcagttgccgattgcaacttatggttgggtagttgatcaggtgtatgcggcgttaaagcagaagtaataaaaaggccagtcagtaatgttactggctggtctgagagtgctgacaaacgcaaaactgcctgatgcgctacgcttatcaggcctacgtggagcccacaatatattgaattagcacgatttcgtaggccggataaggcgttcacgccgcatccggcgtgtacaacgcgcacttggtcaacaatctgaggccagtcagtaatgttactgcctggcctttaatcaatgaatcagaaacgcttacagcgccatcaacttgtccaggctcggtgcgaaataatagccgccggttaccggtttggtgaaacgcaacatcgcatcacgcttaccatcggtatcgccaaacatgctcagcagttgctgctcaatgttatgcagacgcgcgcagtaggcgcagaagtacagaccgtgagtgccactggcagtgccgtacggcaggctctggcgaacaatcttcagccctttgccatcttctttcagatcaacgcgggtgaggtgagaggtttccggacgttcgtcgccgtcgatctcttcgttggcctctttggtgcgcccgatcaccatctcctgatcgtgaacgctcatccggttgagctgcttcaggttgtgttcccaacgctggacaaacacatagctgccgcccgcatccacgccgtctttgataaccgccacttcgcgacgcgtctcttcacccgccgggttttccgtaccgtcaacaaagccgctcaggtcacgctcttcaacccaacggaagccgtggatctcttctttcacttcaatgcagtcaccaaaggcttccatcgccgcctgggcgacagagaagtttacgtcgtgacgcagagaaagaatgtggatcaacacatcgaactgggtcgtcggcgcaaggcctttaccgtagcccggaaaatctttcagctcttctgccccaacgccgccgctcagagcgcgccaggtgttgttaccaaaggcaaccaccgcaccaagatgcgcgtccgggaatttcgcttcaaaagttgccagtttgtcggcaaatgttttactggccgcacgcagggcgtcaacttcccctttcacgttggcttcgatccaaatcgccgcgcggcaatgttctggcaaaatgccactctgaacctgagacattgttcctcctgaaaataataatgccacgcaatccgtggcattgttgagcgctattttacgtgttttttcgcggcggcggtttgttcagacgcaaattaacgccgccagataattttactgactttccagtttttcagggtatcgtcgctaggcattaacccttcaggaccacgccattccccgctgaactggtagctaatatgttgactgccttcggctttacattcgacggcacgattatcatcaccatcagctttttggcaattgccaaatgctttgctgtaaaggtcgctaaacggtgtaccgattttaacaccggtgtcagcaggaatatcgctatccagcacgtcaatgcgactgatcgtgccttgatcgccgttaatcaccatcgccacgttgtcgcccttcatcacttcaaaaaagcgcaccacgttgccgttcgcggttttcattccgctgcgcaggcgataatcgccatcaagcgcatcggcaatggcttgttcttgcagtggtgtggacgccgttaattcacccacgccctgctcgctcactttggtggagctcccaaaccagttccacgggttagcggcagaccagttaacactgctcatcgtggaacagccggtcagcatcaatggcatagcgcataacattaaacgcaggcttttcatgtcacttcctttggttattcaataacgttgcttggagtgcaaattcaccaaaaagtgccgttattcttttacttcataaaaacaagcgcgtaaacgtcgattggtcagcagccagattaacgccacaatatccgccactaccagcgccagaccgataccgctaacggattcaccgttcagccacagccacggttgccagcaaagtaaaaccacctgcgccaacagcaacagaaaatagagtacacgccaggtgcgaggaaacgtagcccgccgaccgctcaacaaaaacgccagcaccgccggaatgccaggaatcagccccagccagaaattatcgtgatcgggataaaacagatttagcagcgcagtaccctgctcgcggctcgcaccggcaatgacaaacagcacccaggttcgcgcctgaagcaatagcacaagccagaagagcaagggtaaacgcaggcgaccgtgcgcatcataatggacaggatgaaactcagtactcttcatcttcaatcaaacgcttacccagactcagcacgtcggcgtgttcatatcccaggcgttcatacattccgagcaccatgtcgttatcttccggcacattgatctgaattttcgggcagccacgagcaatcagctttttctccagccgattaagcaacgcattggcaatcccacgcccacgaaactctggatgcacgccaagataataagcagacccgcgatgcccgtcataaccgcccatcaccgttccgaccacgtcaccgtttacctcagcgaccaaaaacaaactgacgtcatggttcatcttacgctcgatgtccatttccggatcgttccacggacgcagcaagtcgcaacgctcccaaagggtgatgacctcttcgaaatcttcctggcgaaatacgcgtatctccatggtattcgttacctttttgcgggttaaaaggctgattatggcgtgaacggtcgaattagccaatatctgacgaaaatcggttgaaaaagtggcataatggggagttgtcaactattgaaatgaaaagtaaaacaattctcaacagcaaaccgtcgtaacggattacgcgatacgatataacatctggaactttattattacaactcaggccgtatgagcacttttaaaccactaaaaacactcactagccgccgccaggtgctgaaagccggtttggctgccctgacgttgagtggaatgagccaagccatcgccaaagacgaacttttaaaaaccagcaacggacacagcaagccgaaagccaaaaaatctggcggcaaacgtgtcgttgttctcgatccaggtcacggcggaattgataccggagcgatcggacgcaacggtagcaaagaaaaacatgtggtgctggcgattgctaaaaacgtccgttccattttgcgtaatcatgggattgatgcgcgtttaacgcgttctggcgatacgtttatcccactttacgatcgcgttgaaatcgcccataaacatggcgcagatctgtttatgagtattcatgccgatggctttaccaacccgaaagctgccggtgctagcgtatttgccctctctaaccgtggggcaagtagcgcaatggcgaaatacctgtctgaacgcgaaaaccgcgccgatgaagttgccggtaaaaaggcgactgacaaggatcacctattgcaacaagtgctgtttgatctggtgcaaacagataccattaaaaatagtctgacgctcggcagccatattctgaagaagattaagccggtgcataaactgcacagccgcaacaccgaacaagcggcatttgtggtgttgaaaagtccgagcgttcctagcgtgctggtggaaaccagctttatcaccaacccggaagaagaacggctgttaggcacggcggcgtttcgtcagaaaatcgccacagcgattgctgaaggcgtgatcagttatttccactggttcgacaaccagaaagcacatagcaaaaagcgataagttatgaaacccgacgcacaccaggttaaacagtttctgctcaaccttcaggatacgatttgtcagcagctgaccgccgtcgatggcgcagaatttgtcgaagatagttggcagcgcgaagctggcggcggcgggcgtagtcgggtgttgcgtaatggtggtgttttcgaacaggcaggcgtcaactttagccatgtccacggtgaggcgatgcctgcttccgccaccgctcatcgcccggaacttgccgggcgcagtttcgaggcgatgggcgttagtctggtagtgcatccgcataacccgtatgttcccaccagccacgcgaatgtgcggttttttattgccgaaaaaccgggtgccgatcccgtctggtggtttggcggtggcttcgacttaaccccattctatggttttgaagaagatgctattcactggcatcgcaccgcccgtgacctgtgcctgccatttggcgaagacgtttatccccgttacaaaaagtggtgcgacgaatacttctacctcaaacatcgcaacgaacagcgcggtattggcgggctgttctttgatgacctgaacacgccagatttcgaccgctgttttgcctttatgcaggcggtaggcaaaggctacaccgacgcttatttaccaattgtcgagcgacggaaagcgatggcctacggcgagcgcgagcgcaatttccagttatatcgtcgcggtcgttatgtcgagttcaatctggtctgggatcgcggcacgctgtttggcctgcaaactggcgggcgcaccgagtctatcctgatgagtatgccgccactggtacgctgggaatatgattatcagccaaaagatggcagcccagaagcggcgttaagtgagtttattaaggtcagggattgggtgtaactccctcacccccactcccgcatccgctgatgcagcgtcagactcggcttctcggaaaacagctgctggtaatccgtggcaaattgccccagatgccagaatccccactgcatggcggcgtcttttaccgtcatactttggctccacggacttatcagttcgcggcgtacggcgttcaggcgaatgcgtttcagccacgcgttcgggccaatgcctaaaatagcgtgaaacgcgttttgtagcgtgcggcggctgacatgcagttgattacacaaatccagcaccgtcaccggttcggacatgttttccagcacatattcacgggcgcgggaaagcaatcgacggtaactctgatgactgatgctttccgccgtcaccattggttgcgcttcttccagcatggcccccatcgccattagcaaattatcccccagcacttttcgcactgcaggctgatggagattttccggattctcgcaaaacgtcgccagcgcctgttggacaaagccccacagcgcggctttatgctgctctttcacttccagcgcgctctggttacgcaacatatgtaatacccgatccgggttatgcaaaaagttagcctgccgggtgatgacatcttcagaaagcaccacgcccaggatcgtgtaatcatccggcgtgctcagttcaaattcagtgccaccagggcgggtggcgatttccgcgcttcccagacattggctaccgataaatccctgctcaccgcgcgtcgccggaatgccaaaccagaagctgttcggccagaccaggcagctctgacgcagcgccagaccggtgtattcacgaaaaacctgaatatcatcgagtagaatttccgtaaattcaccatgaaacttgcccggatgcagctgatcgtaaatctgctgccaggcggtaatcgttaaagcatgttcatagacatccgttgtctgtcgttgatgaacattatccacttcgaccttcggcgtgagcttcaggttttcgggtaagggttcatgataaagatggtgcaaattggctgtacgggtctttttcatgatgttaatgccgggtgttgtaggacacccggcacctccgacaggttaatggggcttgagacgataacgactactgcgtttacgtaacgtcccggcagaaaagagctgttcgagcgcatttctggctttttccagcggccagccaaagtgggcagccacttctcctgccgtcattccctgacgtacacttgttaacagcgccaacaactcgtcagcagattccgcgacgataactggcgcgtcgggttcccttacgggttgcttcggctggcggttaaagccagtaaccagccactgggtgtcatcgtctggccgaccgatctccttgcggctgatgacacgcccggtacgcatcgcggcagcacaacctgcgtccagcgccgcacgacacgccgccagatcgccttccaccaccagcgttaagcgaccagggtcaagcacttcgtgactgagcagacgaacgttagctgctttgagcatggcatccgctgcatctatcgcggcgaccatgccgtccacttccagcaatcccagtgcattgatcatcggcaacctccgttacgcacgctggattggattacgcgcgatttccagcactgcatcggtaaaggcgttacaggctgctttacacgctgcctggctaccggttaaaaatgctgcgctgtagttggtttcagacggtggcgggacataggtcgccagctgtacgtcggcagacttcagggctgcatcaatgccataggtcgcttccagcggcggtgccaccagatacgccatcggatcgccaagcgtgatcccggcggtactactgagataagaaccggtacggctaactacatgtgccaggaatgccgtatcttgcgcgtcattagcccactggaaagctgcgccattttcaatatgcgcaatcatcgcatccagacctgcacgcacttccgccgggtttggcccaccaagcataatcagcacttcaccggcagtcggactcgggccgtgtgcagcgcccgcatataggctgcggccatacaccacttccaccatcgcctgcttggtcgcttcatcagcggcaatgtaggtgacgtcatcggagtcggcagaaatcagaccgaggctacgaatatgcggcggcaatttcagttcacgcgcaaaatcggcgttaacggaggcaatcacccgcatagcggtgacagacggtcgaatcaaatctaaagctggcatgatgcctccttatcgggtcatgttgatgccggatgctttctgctccagcatacgtttcgccaaatccacaatgacggctgcggcttcaaccggcggcgtgccgccctggtgaatgttagagatacaggtgcgatcggcctcaacggtggtcgccatacgcgggctgtaaacggcgtagcaggagaggctttcactctgacccaaccccggacgttcgcccaccagcaggatcactactttcgcgccgaggatctcaccgatctgatcttcaatcttcacgcgaccataacgaacaaagaatggtgtaccgactttcagcccggcctgtttcaggcccgccatcagcggtggcaggatctcttcgtagttcacggtgatcgcatcagtactcaggccatcagaaataacgacctgtacgtccggattggcaacacactgcgctttcagcgcttcaacagcttctgcacacaggcggcggcccatatccgggcgagtcaggtagagatttttgtcgctaatttcagagcgtacttccagcaagccctgcgctttcacccactcttccggcacttctttcagtacggtatctttgctacgagagtgatcggccaggaaacgcagcagcgcctgcgtacgtggacgcggaccggcacgaccggtacaaacgcgggccacggtgctgcggcgcagttctgttaatacgtctgcgcgatgcggattttcaacaccaatccacgcttttgcttcagcggaacctaaatccagcgcacagctttcgctggtcaccggtgccgcacagttggtggtggcgcactttgcttcactcggcgcgggggccgcttgtcccatactcgccatcacgctgcgtacaatttcttcaatctgtttttgatccatgatatgttatctccgcgtcatcagaagaacagactcggatcgcccgcccgtttggtcaggcgaccgtttgccataatgcccatgctttccagccagcgttcaaactccggactcgggcgcaggttgagtaactgacgcacagtggcggtatcgtggaatgcggtggtctggtagttgagcatgatgtcatcacccagcggcatccccatgatgtagttgcagcctgcggtggcgagcaggatcatcaggttttcgttgaggttctggtcagcgtcagcgtggttggtataacagcagtcacagcccatagagatgccgctcagcttgcccataaagtgatcttctaagccagcacggataatctggcggtcgttgtagagatactccggcccaataaagccgaccacggtgttgacgataaacggatcgtaatgacgcgccagcccgtagttacgtgcttccatcgttacctggtctgcgccgaagttagcgccagcggatagcgcagagccttgtccggtttcgaagtagaggcagttttccccggcgatacggttgaactccgcgcccactgcgcgcgcttcgtcgagcatcgccagctccacgccaaactctttcagccctttttcgctgccacagatactctggaaaatcagcccgcccggtgcgccacgacggatcgcttcgatctgggtggtgacgtgcgccagtacacagccctgagttgggatgttgaatttgtcgatcacgccatagatggtatccaacacgcggcttaagttttccacgtcgtcagtcaccgggttaacgccgatcaccgcatcgcccaccccgaaggaaagcccttcgtagatttgcgcggcgatactttgcacgtcgtcacgggtgtcatttggctgcaaacgggcgctaaaggtgcccggaataccgatggtggtattggcctttttgattaccggcattttcttcgcgccgtagatcaggtccgcgttggagcaaatcttcgctaccgccgcgaccacttcgctggtcagccctttgcgggtaaaggcaatgtcgtccacgctggtttcatcgctcagcacatactcacgcagttcgctgatgctccagtttttaatctggttgtaggccgtttcgttaacatcgtcctgaatcagccgcgtcacgcagtcatcttcataggcaatcaccggattattgcggatgtccgctacggtcatttcgctcaacacctgctttgccgccacgcgctcctgactgcttgccgctgcgacgcccgccagcacatccccgctacgcagttcgttggctttagccagcacctcttttacatccttaaactgatatacattgccgaacaatgtggtctttagtttcataagtcgttccctcaggaaggaaatgcgagacttttcaccgtcaccggcacaacgcttccgccaaaaagaggcgtaccaatgtcgatatagtcccccgcgcggacaatcacttcgtcaatgactgccaacgggagttgttgtagctgtgggcgcaacaacatgcccagagctttaccaaagtcctgcccggccaccaccagcaggggatgcggattcggaaaacgcgcgacgaaatcgaccaacgcgttgatgaccgtcagtaccgcggcgtaacgcacaggcaggctggcgggaagcgccagcacgtacgcgtcagttttgggatcaagatccagctgaatcagcgcctgttgccaggcccccaccagatccgtttcatcaatcgggatcgccaccggcaaattgcgcagcggcagttgtacgccctcaagccagattgtgctgccagagaggctaagggtatgcgcgcccgcgccaatcaccgtggcgcgcacggtttgcgccggaaactgtacgttcatctcacgcaggcgcggatggtcatgcagcgcagttgccagcagcgggccaatatcggcaaaacagaacgggtcggcgggctggtggcgataacattcgcccacgccgccagaaagcgtaatgatttcgggcgtaacacctgcgggcagcaaaccggtttgcatcaatgcctgcgcgagcggactgagcgttccgtcaatcacttcgacaatcagttctgccatccgccgggtcacctgcaccagctgcgcgccggtcaggctacgggcgtcggtgcctgcaccgaagcactcatccacaatcatctgccccggtttatgagcgtaaaccacgcgcccgtggctgtcggtttccagcaggcgaccaccgacgttgaggcaggcagtgccgctgatttttccggcatcgaacagggcgtagttcgcggtgccaccgccgatgtcgatattcagtacccgacacagccgttgttcagaaagggtttgtgccccggctccgtgaccggcgatcacggattcgaggtgcggcccggcgctggcaacgacaaaatcgcccaggctctgagagagcgccatcaccgccgggcgagcattgcgggttttcgcgctttcaccggtgatgatgatggcaccagaatcaacgctttccggctcaatacccgcagcatgatattgctcgagtattaaggttttcagttccgcttcttttaaaccgccctgtttatcgacaggggtaaagaacaccggactttgccagctaatttcgcgtttaatgaattcgtagcgcggcacctggctcaccgccgcacggttaaccagctccagccgggagaaaatcacctgggtggtggtggtgccgatatcgataccgacgctcaatagctggcgagtgttcacgattgtgcctccgcttcggtttaagtcagctttgtgcctccgcttcggttttagtcgcggtcgcgtcttcttttggcaccagcatcatcgccacgccaatcgccgttacgccgccgatcaacttgccgacaatcatcgggaagatcatggcgttcatgttggcagcggcgaagcctaagtggtcgcccagggcgaaagcagcggaaacggcgaaggcgcagttgatgactttgccgcgggtatccatctgcttcatcatgccgaacatcgggatgttgttggcaagcgttgccaccatgccggctgccgcgatgttgttcatattcagtactttaccgacgctcatcagcggtttttcaaaccagcgagtcagcagcagcaccatcggatacgcccctaacagaacgcaggagatagaaccgataacttcaatggcgcgcatcacctcaccgggtttatcgccaggggccataaagataggatccagaccggggatcagttcccagccaagcaggaatttcactaccgcagcggcaagaccgagggtgatcaatgcaacgaggaatttggcgaagatctggaagccgttgatcattttttccgggatgaatttcagccccagcgccaccagaatcgcaacaatgatcaccgggatcatgttcatcaggatcagggcgaaagtgaattccaccggctggccgttgatctgcacaccggagtacatagcaaccagaccaccagcgatacaaccaatcggaatggtcacaatgcccgccagcacgccgagcgccagataacgacggtcagaaggttcgataatgccgagcgccaccggaatggaaaacacaatcgttggccccatcatgctcccgagaattaacccagagtatagccacgcggctacgtcgccgcccgccagctctttggcgaggaagaagccgcccatatcgcacgccagcagtgttccggcgaacatgcttgggttagcgccgagcatttcgtaaaccggaataattaccggcccgagaacgtgagccagtaccggtgccagcgcggtcataccgaccatcgccaggcccagtgcgcccattgccataaagccttcttcgaactgaccgccacttccttcgatacttttaccgaacttaccgaggaaacgagcagaaccgccgaactggctcaggatcctgtctacggcagctatcagcataaagaacatcatgatgtacatgatgatttcgttaattcccatcgcctttactccctgttagttgttatttattggcggatgcggcgtaaacgccttatccgccctacatgtgcaatcccgtaggctggataagacgcggcaagcgtcgcatccggcaattgcaccgcgccactggcggatgcggcgtgaacgccttatccgccctacatgtgcaatcccgtaggctggataagatgcggcaagcgtcgcatccggcatttattgcgccgctgcgtacaggccgacaatctgctccaggctggcggtacgcgggttactgcgcagacaaatatcttccagcgcggcctgcgcccatgcgccgtaatgcgcagatgtcgcaccaacatcgcccagtcgtttaccaatcccaacttccgcaatcagctcacttaccgcgttaatagcgtcacgatcgtcggattttttagttcgcagtgcccgaccaatctgactaaagcgttcacgacaaaccatccggttaaattccatcaccgttggcagcaacatggcgttcgcgagaccgtgcggaatatgcagcgccgcgcccggctgatgcgccatcgcgtggcacaacccaagacccgcactggaaaacgccattcccgccatacaactagccagcaacatgctctcgcgcgcggcaaggtcgtgaccgtagcccaccgctttcggcaggcttttgccaatcatcgcaatggcaccaatcgccagactgtcggtaaacggtgtagcgttcagggcgctgtatgcttcaatggcatgggttaacgcatcaatgccggtcatcgccgtgacatggctcggcacaccttcggtcaatgcggcgtcgaggatcgccacatccggcatcaggctggcatgggctaacacctgcttgcgcccgctcaccgcgtcgataatcaccgttacattggtggtttcagagccggttccggcggtagttggaatggcaatcagcggcaagcgcggttgcagaacgctggtttcactcatctctgccagcgtgctatccgggttcgtcaccagcaacgtcacggctttcgccgcatccagcacgctgccgccgccaaacgcgatcaccccatcacagccactctcacgcaactgcgccacggctgcacacacgtcggtaatgcacggttcgcccaccggacatggccagagcgtcatggcgatacctttaacggtcaggctacgcgtcagcccggcggtcatccctgcctgatgcaaaaagctgtctgccatcacgaacagatgtttcagcccacgcgtttgcgcttgctgtccgcaactgctcacgctgcccggaccgcaaagcgtcaccggtggaacgctaaatgtttttacccgttgcagattcagggtatcgaacgcctgaaagagcgcggtctgcaattcattttgcatatagcccctccgctttctctcgcccactactggcgatcgccagcggggtcataaacaaactgtgctgcggtaaatgcacctgtaacgccgggaattgtttgcgaaacagttccgccacgcccggttgcatacaagagccgcccgccagccataaatcagtaatgccctgcccttcaatatgccgggcgacaatgtccgccattttttcgtacaccggtttcaccgcaggccaaatctcttcaccgtgaccgcgcttgtactgctccgcctcttccaggctaatacggcgatttccggcgagagtcagagagatgtgatgtccgccggtggcttcatccgcgctgtacgtcaccttgccctttttcacgatggcaatgccggtagtgccgccgccgatatccactacaccggcgttgtccagttgcagcagatccgcaactgcggttggctcatccagcacatggctcacttccagtccggcagattccagcacgttgatggaaatacgcgggtccgtacctggaggaaaactagtcgccgcatggctaaaacgacgaccgaattgctgctcgagcgtgtcgagatggcgacgaacaatggtgacagcgccgaagaaatcccagacgatgccgtcgcgaaccacatcggcccagtcgaggcataccgccactggctgaccgtcgcggtcgacaaccatgctcaccacatcgcaggtgcccagatccacccccagccacagcggagattccgtcgcggcgggcgtctggttacacagcgttgccgccgtttgcagacgtggggtgagccattgttcgtcgtgcgccatctgttactccttaaacaatgcgaaacgcatcgactaatacacagcgacgcagacggacaaacgtacgcgcgctggttaccccttcaccggttggcgtggtgatggtcatggtggtccagccttccccgcccagccccagcccggcaatgcacggtccgttcttaacgaaaatgctggtatcaatagcattcgccatctggttcatgttttcgatgttgcggctgtgcattgccgccgtgtggtggcaaccgccttccagtttcaccgctagcgcaatggcatccgccacgttggcgacgcgcacgacgggcaacaccggcatcatcagttcagtcacggcaaacggatgttctgcggtggtttccacaaacagcaggcgcgtttcttgcggaactttaaggccgattgccgccgcgattttgcctgcgtcgcgaccaacccagtcacggctgacggtgccttttccgcgctcgtcgatatttttcagcaacaccggttgcagctgctgcgcctgttctgcggtcagtttcaccgcgtgctggccttccatcagacgcatcagttcatcggctacgctatcaacaacaatcagtaccttttcgtcggcacaaatgatgttgttatcgaaagaagcgcctttgacgatggactgagcggcacgggcgaggtcggcggtttcatccaccactaccggcgggttgccagcgcctgcggcaatcagacgtttattggtgtgtttacgcgccgcttctactaccgcttcgccgccggttaccaccagcaggccgatacccggaaacttgaacaagcgttgcgcggtttcgatatccggatttgccacagtaaccagtaagttttccggcccacctgcggcaacaatcgcctggttgagcagcgtaatcgcccgctgggagacttttttcgccgccggatgcggggcaaaaatgacgctgttgcccgcggcaatcaggctgatggcgttgttaattacggttgccgccgggttagtggaaggcgtcacgctagccaccacgccccagggtgcgttttcaattagggtcaggccgttgtcgccagtcagcacttgcggagagaggcactcaacgcctggtgtgccgcgcgcctgagcgacgttttttgcaaatttatcttcaacgcgccccatgccggtttcactgacggcaagttccgctaaatctctggcgtgtttttcgcctgcttcacgaatggcagcaatggctaactggcgcattgccacgctttttaacccttgctgggcgactttggctgccgcaacggcgtcatccagggacgcgaaaacgcccatctcatgaacggcggcggacggcgtgtcactgctttgcattttcagcagtaccgctttcaccacctgttcaatatcctgttgattcatgatgttctgccttatttgtggaaaattacctgaccgccagacaccacctcatcgacaatgccaatcacgcacagatcgaccggactcgtttcgcttttatgcgcctggcgggcggaactgccactcaccagtaacacccactccccggttcccgcgccaatattgtcgatggcgacggcgcattgcccgtcaggattaccttgtggatcaatcatttccaccatcagcaatttgtcatgcgccagtccgtgatggcgtacggtacaaacaatttgtccagtgacgactgccagtttcatacccgcctccgtggcgtatttcaggtaaaagctccccctaccctccgcagaaggtaaaatgaaaaaggagagagcgtgacgcccgaatcgacgtcacacagggtgattacaggttgctgctatcgcctttcaggccgatcgggaagacttcttccaggtcgccgtgcggacgcgggataacgtgtacagataccagctcgccgatacgctgtgccgctgcggcacctgcatcggtcgcggctttacaggctgcaacatcaccacgaaccatggcagtacacaggccgccgccaatctgcttaacaccaaccagcttgacgcgcgcagctttcaccatcgcgtcagaagcctcaatcagtgcaaccaggccccgggtttcgatcattcctaatgcttccattgtgctttcctctttatcagggtccagaacgggaccgttcattcaaccagtgtttgtaaactgctttcgcggttcacttctgtctgacgcggcacagctgccaccagcgccagctcgataatttcctgcacgctacaaccacgagagagatcgtgcatcggcgcggcaagtccttgtatcagtggcccgacggcacgatatccgccgagtcgttgtgcgattttgtaaccaatatttccggcttccaggctcggaaaaaccatcacattggccttgccctgtagcgggctggcaggcgctttttgcgccgccacttccggcacgaaggcggcgtcaaactgtaactcgccatccaccaccagctttggtgcgcgctcacggacgatttctgtcgcctgctggacgttagcaacacaggggtgacgggcgctaccattgctggaaaagctcagcatcgccacgcgcggctcttctccggtgatggcgcgccaggtttcggcactggcaagcgcgatatccgccagctgcgccgccgtcggctgtggcaccacgctgcaatcggcaaagcccaacgccgggccgctgtactgtggcaacatcaggaaaatggaagagagcgttttacagcctggctgcaagccgataatgcgtaatccggcacgcagcacatttgccgtggaagagaggttgcccgcgatacagacatccgctttaccggcgctgaccattgctgcggcgaacatcagagggtcggtaagtttttccagcgcatccggcggcgttttttcgcccgcgcgggccagccagcgatgagcaaattcttcccgcattgcgaggttgccatgcggatcaatcacctgtagcccgtccatcgccacgccgtgactgagcgcaaactgacgaagttcaaacggattggcgaccagaatgggcgttgccagaccttgttgatgtaaatattgcgcggctttcagcacacgttggtctaacgcatccggaaaaaccactctggcgggcgctcgcaacgccagttcacgacaacgttcaataatcattgcgtttcccccagtcgttgttggatctgcttcaccgttagcggctgcttcgttacgctcaggatcatcatcacgtagaccgtgctgctaaggcggttcagcgcctgcaaaatgtccgggcgtaatacttcaaagctgcgggtgataaagacctgcgccgctacggtttcggtttcccgcactttggtgcgtagcagattgagcaacgcagcatcgcgcccgtggctggcttccggcaccagatgatcgtggtcgagatagcgcagcggctgatgagaaagccgatgcagatcttcgtcagaaagcccgacaatcgcctggcagcccagcggttcccccagcgcatcggcgcgcataatgttgccaagacggctacggatatccgccagccacggctgccacggttccgccagttcaatttgcagccacactgccagcgcaatggtgctgtcgagaaccgcgcgaaaacccagacgcggatcgcttttggcgaccattttttccgcgctcaggtgagtcagcgtatccggcttttttgccaccggctggcgacacagttcgcagcacgcctgcggatgttcatcgctactggtcagcccatgaacgggctgcggctgctgctgttcatcgtcaacaaacaggcggccctgctcgtcaataaacttgatgcgcagatggcggctttccagcaactcccgggcagagggcgtcaggcgactgtccgcagggagatggatctctgcgccttcgctgagcgtatggttcgctcttagccatgcttcggtgatgaaatctttcatagggattgccagttagccggccaggcgacatacaggaatttcacgctggatgtcgtaccaaattcgatgctggagcctttcgggataaacatcacgtcgcctgctttggcgatcatggtttggccttcgtggcgaacatgcagctccccttccagcaccatgtcgatttcgtcgtagttcagggtccacgggaagaatgcgttctcccactgcataaaaccggcggccatgctgctgccgtcgtctccggtcacaagatcagtcaagcccacgcaatgcggctctgcgccgtcgaaacgaccaaacttgacgctactgccatcaatcactttgatgccgcctttgccggtcacgcttttgaagctcggctgcattgcgccctgctccaggctctgtttttccttcatcactttttccatcagctgtgcgaccaggctttcggtaaactggccttccggcagctgggcaatgatggtttcgcggatgcgctggctttcggttttgtcggctggcacgctggcgggcacggacgccgttaccgggatgctttcatcacattcggtgatggtaaaacccagtagatccgccacttcacgggcttccggggtaataatgctggcgcgcagaaccacggacattgcctgttcgccgcgcgcgtgtgcttcacgaatatcattcgctgtgatgagttttttcacctgcttcctcctgtttggtgagagatgccagataatccaccagttgctgcacgctttgcgggtcgtggctgtttagctcgaacatcggctcttcgaaacccgtctcaagcaataactttcgcgttgcggcgacgtcagcatctggcatgtccgttttactgatgacggcgatttgccgtttgctgacgccaatatccagcaacccggcaggcaaccgactttccgggtcatttgcgccatggacatagatcagcatgtctacatcctgtagcgtggtaattaaggcgtgataccagcggggatggttaaaatattcacccggcgtatcaatatcgcccttatcattaaattccacggcctgtgtttttctggcgagggtataattcccctgcaacgcattaaataacgttgtttttcctgccccgacgctacccacaaacgcaattcgtttcatgaatgcctcgtattaacttttggtcatttcacaaagcgtataatttaataagcgacctaaaccgctgacggtttgacttaacgcttcttctactgcgcccacgctgccataaatcaccaatgcaccgctgaatcggtcgagaaaaccgatatgcacatcagcggctttcagcgctaaatcaccggcgatcatcgccgtttcgccgggagttagcgtcataatgccaattgcgcccgcatccggaacgccgattttcttcgccagttcctcaccgggatgcgcgatgagatgcgccagtgtgacctgtttgccgggcacaaattcctgaatgatgcgttctttatccatgagtcgccgcctgtgaaaaactttcgtgtatcgtgacaatttttcgtcagagtaaataacaaaattcggcaagcgcgtttaaaaggtgaggtagatcactaagaatggagagatattcgctgtggtgcataaactttcatatgcaacgcatgaatataaataaaataatatcgagatattatatagactgcttttttttattattcgcaaactcagtaataagctttactaatatattgcagctaaactgcttaccctgaatattcagggtaagcgtgagagttaaaaaaaattacagcggttgggtttgcgcttctaccacggccagcgccaccatgttgacgatacgacgcacgcttgcgatcggcgttaacacgtgaaccggtttcgccacacccatcagcaccgggccgacagtcacaccttcgctgctggaaacacgcagtaagttgtaactaatgcgggcagcttccatgttcggcatcaccagaatattggcggaacctttcaaagagctgtccggcatacggtcgttgcgaatcgcttccaccagcgctgcatcgccgtgcatttcaccatcaatcatcagttctggtgcacgttccctgaccagttccagcgcctgacgcattttgctgctgctcgggcagtcagaagaaccaaagttggagtggctcaacaaagcaacgcgcggctcaataccaaaacgacggacagtttctgccgccatcaaggtgatctccgccagctcttctgcatccggttcatcattaacatatgtatcggcaataaaggtgttaccactcggcagcagcagcgcgttcatggcacctgcggtgtgaacgccatcgcgataaccaaagacatttttcaccacgctaaaatgttcatgataatcacccaccgtaccgcaaatcattgcatcggcttccccacgctgaaccatgatcgcgccgatcactgtcgggttactgatcagcgcccgctgcgcctgttcctgagtgacgccgcgacgcttcatgatctggaagtattcggtccagtactctttaaagcgcggatcggattcgttattgacgatctcaaaatcaacgcccgctttgatctgcaagcccagtttctgaatgcgcatttcgatcacgttcggacgaccgataaggatcggtttcgccagtcccagcgttaccagttcctgagtggcatgcagaacgcgcgcctcttccccttccggcagaacaacgcgcttcggcgctttgcgagcctgggagaaaatcggcttcataaacaggttggttttgtaaacgaactcagtcagcttgtcgatgtagacgtcgaaatcagcaatcggacgagtcgccacgccgctctccatcgcggctttagcgaccgcaggagcgatcttaacgatcaagcgcggatcaaacggttttggaatgatgtattccggaccaaagctcagatcctgatcgccatacgcactagccaccacttcgctctgttccgcatgggcgagttctgcaatcgcacgtaccgccgccagtttcatctcttcgttgatggcggttgcgccaacgtccagcgcgccacggaagatgaacgggaagcacaggacgttgttcacctggttcggatagtcagaacgaccggtgcaaatgatggcatccggacgcacttctttcgccagcggcggcagaatttccggttccgggttcgccagcgccaggatcattggcgcacgagccattttcttcaccatttcctgggtcagcactttcgggccggaacagcccaggaaaatatccgcgccttcaatcacatcatcgagggtacgtttgccgtcatccaccaccgcatatgcggctttggtttccgccatgtttggctcacggccctgatagataacgcctttactatcgcaaaccacgatgttatgtttttgcagacccagcgctaccagcaggttcatacaggcgattgctgcggcacccgcgccggaaaccaccatccgcacgtcggagatgtttttctccaccacgcgcaagccgttgaggatggcggcagtgctgataattgccgtgccgtgctgatcgtcgtggaataccggaatattcatccgctcgcgcagtttctgttcaatatagaaacattctggcgctttaatgtcttcgaggttgatgccgccgaaggttggttcgagcgcggcgacaacttcaataaatttgtccgggtcgagttcgtcaacttcaatgtcaaatacatcaatcccggcgaatttcttaaacagaacgcccttgccttccatcaccggtttgcctgccagcgcgccaatgttgcctaaccccagcaccgccgtaccgttagagatcaccgccaccaggttacctcgggcggtatatttgtaggcttttaacgggtctttttcgatttcaagacaaggtgcggcaacgcctggactgtaggccagcgccagatcgcgctgtgttgccagaggcttggttggagaaacctggattttccctggaactggaaattcatggaaatcaagtgcactttgttttaactggtcatccatttggttgttcctttcacgtaacgttcacaaataaagtgtgtgggcaacagcccctgcccacaacgtggcgcacattattaccctgccggagtctacagactttgagcaagtccaaactctcaccattaatataatgttttggtaataatcctataacactgatgttacctgcttaatccagcaataccatgcctgtctgctatgcttttttgatgcgtttagcgaaatttctcagaagtgtgaattaacgcactcatctaacactttacttttcaaggagtatttcctatgaacgagttagacggcatcaaacagttcaccactgtcgtggcagacagcggcgatattgagtccattcgccattatcatccccaggatgccaccaccaatcctagcctgttactcaaagctgccggattaagtcaatatgagcatttaatagacgatgctatcgcctggggtaaaaaaaatggcaagacccaggaacaacaggtggtcgcagcgtgtgacaaactggcggtcaatttcggtgctgaaatcctcaaaatcgtacccggtcgcgtgagtacagaagttgatgcacgcctctcttttgataaagaaaagagtattgagaaggcgcgccatctggtggacttgtatcagcaacaaggcgttgagaaaagtcgcattctgatcaagctggctagcacctgggaaggaattcgcgcggcagaagagctggaaaaagaaggtattaactgcaacctgacgctgctgttttcttttgcacaggcacgggcctgtgcggaagcaggcgtttttctgattagcccgtttgtcgggcgtatttatgactggtatcaggcacgcaagccgatggacccgtatgtggtggaagaagatccgggcgttaaaagcgtgcgcaatatctacgactactataagcaacaccactatgaaaccattgtgatgggcgcgagcttccgtcgcaccgaacaaatcctcgccttaaccggctgcgatcgactgactatcgcaccgaatttactgaaggagctgcaggaaaaagttagcccagtggtacgtaaattaatcccaccttctcagacgttcccacgcccagctcccatgagcgaagcggagttccgttgggagcacaatcaggatgcgatggcggtagaaaaactgtctgaaggcattcgtctgttcgccgttgatcaacgcaaactggaagatcttcttgccgccaaactataaaccagccacggagtgttatatgtcccgaaaagaccttgccaatgcgattcgcgcactcagtatggatgcggtacaaaaagccaactctggtcatcccggcgcgccgatgggcatggctgatattgccgaagtgctgtggaacgattttcttaaacataaccctaccgacccaacctggtatgatcgcgaccgctttattctttccaacggtcacgcgagcatgctgctctacagtttgctacatctgaccggttacgacctgccgctggaagaactgaagaacttccgtcagttgcatagcaaaaccccaggccacccggagattggctatacgccaggcgttgaaaccaccaccggcccgcttggacaaggtttggcgaacgccgtcgggctggcgatagcagagcgtacactggcggcgcagtttaaccagccagaccatgagatcgtcgatcacttcacctatgtgtttatgggcgacggctgcctgatggaaggtatttcccacgaagtctgtagcctggcaggcacgctgggactgggcaagctgattggtttttacgatcacaacggtatttccatcgacggtgaaacagaaggctggtttaccgacgatacggcaaaacgttttgaagcctatcactggcatgtgatccatgaaatcgacggtcacgatccgcaggcggtgaaggaagcgatccttgaagcgcaaagcgtgaaagataagccgagcctgattatctgccgtacggtgattggctttggtagcccgaataaagcaggtaaggaagaggcgcacggcgcaccactgggggaagaagaagtggcgctggcacggcaaaaactgggctggcaccatccgccatttgagatccctaaagagatttatcacgcctgggatgcccgtgaaaaaggcgaaaaagcgcagcagagctggaatgagaagtttgccgcctataaaaaggctcatccgcaactggcagaagagtttacccgacggatgagcggtggtttaccgaaggactgggagaaaacgactcagaaatatatcaatgagttacaggcaaatccggcgaaaatcgctacccgtaaggctagccaaaatacgcttaacgcttacgggccgatgctgcctgagttgctcggcggtagcgcggatctggctcccagcaacctgaccatctggaaaggttctgttagcctgaaggaagatccagcgggcaactacattcactacggggtgcgtgaatttggcatgaccgctatcgccaacggcatcgcgcaccacggcggctttgtgccgtataccgcgacgttcctgatgtttgttgaatacgcccgtaacgccgcgcggatggcggcactgatgaaagcgcggcagattatggtttatacccacgacagtattggcctgggcgaagatggtccgacgcaccaggctgttgagcaactggccagcctgcgcttaacgccaaatttcagcacctggcgaccgtgcgatcaggtggaagcggcggtgggctggaagctggcggttgagcgccacaacggaccgacggcactgatcctcagtaggcagaatctggcccaggtggaacgtacgccggatcaggttaaagagattgctcgtggcggttatgtgctgaaagacagcggcggtaagccagatattattctgattgccaccggtagtgagatggaaattaccctgcaagcggcagagaaattagcaggagaaggtcgcaatgtacgcgtagtttccctgcccagcaccgatattttcgacgcccaggatgaggaatatcgggagagcgtgttgccttctaacgttgcggctcgcgtggcggtggaagcaggtattgccgattactggtacaagtatgttggtctgaaaggggcaattgtcgggatgacgggttacggggaatctgctccggcggataagctgttcccgttctttggctttaccgccgagaatattgtggcaaaagcgcataaggtgctgggagtgaaaggtgcctgatggtgattgccggatgctgattgccggatgcgacgctgacgcgtcttatccggcctacagcgtcttatccggcctacatgtcccgccattttgtttaacgggtgatccacaacgtgggccaggcgtctggcccatgccagttatcgcaggtgggttctgcggcgtaacgcaccaggcgaaaacgctgaccgtcaaagcgccagcgcgcctgaatgccacaatcgcttaatccgcgccctttcgctaaggtcaccagttcacggcttttctcatcaaatgttgcgttcatcagttccagttcattcgtctcctgaccgttgttgaacggcaaacgcaaccgaaccgggcggctagctagtggctttttacggctcacaatccatgccaaatcaatggtgttataggcccctgcctcacagctaatcatcatcagcgctttatcatcagtcagcgcagtgacattcacctcacgacgcaatggatcaaggctgcagcgcagaccattcatccgccagtttccataatccagcaaatcgttgcgttcttcgagactgagtggcgtcggcgttgggttaaccaccgcgacctctttcagcgcaggcgcgggcggtacgctgagcggcggttcgtcccctttcttgatccacgcggtttcactgccaacgcgcttttgctgagcatcaataaacaacaacgctgcttttaagccactcagagaaatggtctgatcgccatcgcgtaaggtgattgccttcccttcctgaatcatctgcaaaaacgcggtgatggttgccgtatcatcggttactaataaccatggactaatccgccacttgtcaccacttaacgccaacggctcgccatctaacagcagccgtggcgctatctccccttcactcgcctccgggctcttcaatccgccgcgctcaatacgtaaaacggcatcggtatgcgccccggcgctgcggctcagggtcatcaccagtccattatgatcgcccgtattacgcgccacgcagaaattttggttattacaggtgacctgccagtcggaaaacgcccgttgcgctggtgccgcccacaccaaagacgtcggcaacaaagcgaaaaaaaagagaaggaaaatgcgatagcgcatggacggtacgaccccagaagttcaaacaaacagcacaagtcgtatcttcgttgcgcaggtagcgcggctcaatcggatttgtcggattgagccaataataaacaacgaaatattattgttatttttcagtccattaaatgactcgtttgcaaatagttaagcaataacaccgtcttaccgtcacgtatctcgccggttttgatcatctccagcgcctggctgaacggcagctcgagcacttcaatatcttcatcttcgacaccgccaccggcgttagcgcgctgattgtcactgtattcggcgataaaaaagtggattagctcagtcacaccgcctgggctcatatacagttcaaataatttgcgcacttcacccacttcatagcccgtctcttcaatcgcttctttgcgaatacacacttccggttcgtcgttatccagcagcccggcgcagctttcaatcagctgcccgctttcattgccattaacccaggtagcgacacggaactgacgaatcagaaccacggtctttttcttcgtgttgtacaggaggatcgtcgcaccattgccgcgatcgtacacttcacgtttatggcggataacttcgccgtctttgcgcgtgagatcgtaagtaatgttgtgcagggtgaaatagttatcggagagaattttgtctttaatgagggtgatttgttgcgtcataccgactccacagcgcgaaatgaacaattatcttacgctgtgaagtcgggtttgtctgcgcaggctatcagtgagatttgacactttttacccccagccagtcaataatcccctgtgccgcatgacgtccttctgccattgcggtaaccaccagatccgcaccacgcacggcgtcaccaccagcgaagattttcggattggtggtctggtaacggtactggctttccacatccgcgatgatgcggccccatttgtctaccgttacaccgtggctctccagccacggcatcccgtgcggattgaagccaaacgccataatcaccgcgtcggctggcatgacaaattcactgccttccaccggcactggacgccgacgcccctgggcatccggctctccaagacgcgtgcgcaggaaacgaatcccgcagacgtgaccttgttcattcagctcaagcgccaccggctggacgttaaattcgaagttggccccctcttcgcgggcgttcttcacttctttcttgctgcctggcatgttagcttcatcacgacgataagcgcaggtgacgttactcgcgccgtggcgcagtgcggtacgcacacagtccatcgcggtgtcgccgccgcccagtaccacgacgttaagtccggcggtattgataaacggctcttccggtagctcttcgagccccatcacctgtttagtgttggcaatgaggaacggcagcgcgtcataaacgcccggcgcatcttcattgggtaaacccgctttcatggaacggtaagtgcctacgccaacgaagaccgcgtcgtattgttccaaaaggctatccaaagagacatctttacccacttcacaattgagttcgaagtgaatccccatcgcgctgaagatttcccgacggcgtgccagcagggatttatccagtttgaaagaaggaatgccgaaagtgagcaagccaccgatttctggatggcgatcgtacaccgtcacccccacgccattgcgggtcagaacatccgcacaggccagccctgccggacctgcaccgataatcgccacccgcttgtccactttggtgacatggcttaagtcaggacgccaacctttcgccaacgcctgatcactaatgtagcgttcaatgttgccgatagttaccgcgccgtgctcatcgcgaatagtacaggcaccttcacacaaacggtcttgcggacaaacgcgtccggtaatttccggcagggtgttggtctggtgagaaagctcgacggcggcgtcgatgtttccggctttcaccagttcaatccactgcggtatatggttatgcagcgggcaggtccattcacaaacgctgtgctcgccgcacttaaggcagcggctggcttcccgttgtgcctggtcggcgcgaaatggcagataaatttcatcaaaaccggttttgcgcgcttcaatcgccagtttatccggctcgccacgcgcgggcgttgcctgcatttgttcgactttactcattaccggcatttcttgcgccgcggtactggcatgccacggttgatgttcctgacgcgcggtgcgcaagcggcgggatttcgccatgccggagagtgcgacgtcagtgaccagttgcagcgcgtccgccgggcaattctcaacacaggcaggaccgttttcgcgccccgcacaaaggtcgcatttatgcgccgtggcttttacttttcctgccgcgacgggtgtcaggacgatttgcatcgtaccaaaaggacaggccaccacgcaggatttacagccaatacacttttgctgattgacctgaatgctgtcatcaacgtggctgattgcgccattagggcagctacgggcgcagggcgcatcttcacaatggtgacaggtcactgcactacgttgctgttgatgtttgataaccgtaattcggggatgaaaatggtgttggctcaggacatgttgctcatcattgtgagccatgacacaggcgatttcacaagcatgacaacccagacattgctgactgttggccataataaaacgattcataacgaccttcttttttggttgtaaaaaccttattctttatatgagtgttgttattacccgacttacaggggaatcggcaatgttcatgtgcccagaataagtaactatttcgctataaactgtggcagatcaaataatcccatcactgactaaattgcgtttcagcgaactggaacattaatgattttttgtggagaagacgcgtgtgattgttaaacgacccgtcagcgccagtctggcccgggcctttttttacattgtgctgctgagcattctttccacgggtatcgctctgctaactctggcgagcagtttgcgcgacgctgaggctatcaatattgccggaagcctgcgtatgcagagttaccgcctgggctacgacttgcaaagtggcagtccacaactcaatgcacatcgccagttatttcagcaggcactgcatagtccggtattaaccaacctcaacgtctggtatgtgccagaagcagtaaaaactcgctatgcgcatctgaatgccaactggctggagatgaataatcggctcagcaagggcgatttgccgtggtatcaggccaatattaataattatgttaatcagatagacctgttcgtactggctttacagcactacgctgaacgcaaaatgctgctggtggtggcgatttccctggctggcggcatcggtattttcacgctggtcttttttactttgcgccgcatacgccatcaggtggttgccccgctgaatcagctggttaccgccagtcagcgtattgaacacgggcagttcgacagcccgccgctggataccaacctgccgaatgagcttggtctgcttgcaaaaacctttaaccagatgagcagcgagctgcataaattgtaccgtagcctggaagcgagtgtagaagaaaagacccgcgatctccacgaggccaagcgtcgtctggaggtgttgtatcagtgtagccaggcgctgaacactagccagattgatgtgcattgtttccgccatattttgcagattgttcgcgacaatgaagcggctgaatatctggagttaaatgtcggtgaaaactggcggattagcgaagggcaaccaaacccggaattgccgatgcagattttaccggtgacaatgcaagagacggtttacggcgaactgcactggcaaaatagtcacgttagtagtagtgaaccgctgcttaacagcgttagcagcatgctgggacgcggtttgtactttaatcaggcgcagaagcattttcagcaattattgttgatggaagaacgtgcgaccatcgcccgcgaattgcacgacagcctggctcaggtactttcttacttacgtatccagttgacgttactgaagcgtagcataccggaagataacgccaccgcacaaagtatcatggccgatttttcccaggcgttgaatgatgcttatcggcagttacgcgagctgttgactactttccgcctgacgctgcagcaggcggatctcccctccgcattgagggaaatgctggatacgttacaaaatcaaaccagcgccaaactgaccctcgactgccgtctgccaaccctggcactggatgcgcaaatgcaggtgcatttgttgcaaattattcgcgaagcggtgctgaatgcgatgaagcacgccaacgccagcgaaatcgccgtcagttgcgtcaccgcgccggacggcaatcacacggtttatatccgtgataacgggattggtatcggtgaaccgaaagaacccgaaggtcattatggtctgaatatcatgcgcgaacgcgcggaacggctaggtgggacgctgacttttagtcaaccttccggcggcggcacgttagtgagtattagctttcgctctgcggagggtgaggaaagtcagttaatgtaatgcctcctactgaccaaagaatacttgcacttaaggttcagtataaaagggcatgataatttacattaactcctttttttctccacgattggctcgtaccttgccgctacagtgaagcaagtcaagcctacaacgatacgcagaaacacgaggtcctcttttaatggcgaatttctttattgatcgccccatttttgcctgggtgctggcaatcctgttgtgtctgacaggtaccctggcgatttttagtttgcccgttgaacaataccccgatctcgcgccaccgaatgtgcgagtgaccgctaactatcccggcgcaagcgcccagacgctggaaaacaccgtgacccaggttatcgagcaaaatatgaccggcctcgataatctcatgtatatgagttctcagagcagtggcaccggtcaggcatctgtcactttaagttttaaagcaggcaccgatccggacgaagccgtgcagcaagtacaaaaccagctgcaaagtgccatgcgaaagttaccgcaggcggtgcaaaatcagggcgtgacggtgcgtaaaaccggcgataccaacattctgaccattgccttcgtctctaccgatggtagcatggataaacaggatattgctgattatgttgccagtaatattcaggacccgttaagccgcgtgaatggcgtcggggatatcgatgcctatggtagccaatattccatgcgtatctggctggacccggcgaaactcaacagtttccagatgacggctaaagatgtcactgatgccattgagagtcagaacgcgcagattgcggttgggcaacttggtggtacaccttccgtcgataagcaggcgctcaacgccaccattaacgcccagagtctgctgcaaacaccagaacagttccgcgatatcaccttgcgggtcaatcaggacggcagtgaggtaaggctgggcgatgtcgccaccgtcgaaatgggggcggagaaatacgattatcttagccgcttcaatggtaagccagcctccgggctgggggtaaaactggcctccggcgctaacgaaatggcgacagcggagctggtgctcaatcgtctcgacgagctggcgcagtatttcccgcatggactggaatacaaggtggcgtatgaaaccaccagctttgttaaagcctccattgaagacgtggtgaaaacgctgctggaagctatcgctctggttttcctcgttatgtatctgttcctgcaaaacttccgcgccacgctgatacccactatcgccgtgccggtggtgttgatgggaaccttctccgtactttacgccttcggttacagcgtcaacaccttaaccatgttcgcgatggtgctggcgatcggtctgctggtggatgacgccatcgtggtggtggaaaacgtcgaacgtattatgagtgaggaaggactcactcctcgcgaagccacacgtaaaagcatggggcagatccagggggcactggtcgggattgcgatggttcttagcgcggtatttgtaccaatggccttcttcggcggcaccaccggtgccatctatcgccagttctctattaccattgttgcggcgatggtgctgagtgtactggtagcgatgatcctcactccggctctgtgtgccacactacttaagccactgaaaaaaggtgagcatcatgggcaaaaaggcttttttgcctggtttaaccagatgtttaaccgcaacgccgaacgctacgaaaaaggggtggcgaaaattctccaccgtagcctgcgctggattgtgatttatgtcctgctgcttggcggcatggtgttcctgttcctgcgtttgccgacgagcttcttaccgctggaagaccgtggcatgtttactaccagcgtacagttgcccagcggtagtacgcaacaacagaccctgaaagtcgttgagcaaatcgagaaatactacttcacccatgaaaaagacaacatcatgagcgtgtttgccaccgttggttctggccctgggggtaacgggcaaaacgtggcgcgaatgtttatccgcctgaaagactggagcgaacgcgacagtaagaccggcaccagctttgccattatcgagcgtgcaacgaaggcgtttaaccaaattaaagaagctcgcgttatcgccagcagcccgccagcaattagcggtcttggtagttctgcaggttttgatatggagttgcaggaccacgctggagcgggtcacgatgcgctgatggcagcacgtaatcagttgctggcgctggcggcggaaaacccggagctaacccgtgtgcgccataacggcctcgacgacagtccgcagttgcagattgatatcgaccagcgtaaagctcaggcgctgggcgttgctatcgacgatattaacgacacactgcaaaccgcctggggtagcagctatgtgaatgactttatggatcgcggtcgcgtgaagaaagtctatgtgcaggcagctgcgccgtatcgcatgctgccagatgacatcaatctctggtatgtccgaaataaagatggcggcatggtgcccttctctgctttcgcgaccagtcgctgggaaacaggcagcccgcgtctggaacgctataacggttattctgcggttgagattgttggggaagccgcaccgggggtcagtaccggtacggcgatggatattatggaaagcttagtgaagcagctgccaaacggctttggtctggagtggacggcgatgagctatcaggagcggctttccggcgcgcaggctccggcgctgtacgccatttccttgctggtggtattcctgtgtctggctgcgttgtatgaaagctggagcgtgccgttcagcgtaatgctggtcgtgccgctgggggtaatcggcgcgctgctggcaacctggatgcgcgggctggaaaacgacgtttacttccaggtgggcctgttaacggtcattggtttaagcgcgaaaaacgccatcctgatcgtcgagtttgctaacgagatgaaccaaaaaggccacgacctgtttgaagcgacgctccacgcctgccgtcagcgtttacgcccgattctgatgaccagcctggcatttatcttcggcgtattgccaatggcaaccagcacgggtgccggttccggtggtcagcatgcggtgggtactggcgtaatgggcgggatgattagcgccactattctggctatttacttcgtgccgctgttctttgtgctggtgcgccgccgcttcccgctgaagccgcgcccggaataagcaataaaaaaggcgacatgccaatgtgtcgcctttttcaactttccgattaagaacctgctcagcgggttcttgctgtttgtactttgtctcaggaattacttacgaagcataacttcgataaagtctttccagttccccagttcacgttcaatcataacaacctctcttataattatgggtattctacggaaacaatataccgtggtgaagctaatttactcgattgctgcgatgactacctccgggggacaaatcttatgtaaatactatggtcctgcggtgatgatttgtatgtgatacacagcaacatttcgagatattcatacggcatctaatactgatttaattctggttaaaatacagacagataacaagatgaatattcttaatgtttacgttaaaaatgtttaatattatttaatagttgttaatttgaatacttcgataatgttatatttcctgataatcatttgcaggcaaaatgttttcacccttaaatgagtatttattctcataaatcgaaaaaggattcattatggttacactttacggtatcaaaaattgtgacaccattaaaaaggctcgccgttggctggaagccaataacatcgactatcgttttcatgattaccgcgtcgatgggctggacagcgaattattgaacgattttatcaacgaattaggctgggaagcgttactcaacacccgtggtacaacctggcgtaaactggacgaaaccacccgcaataaaatcaccgatgcggcctctgcggcggcattaatgactgaaatgcctgcaattatcaaacgtccattgctctgcgtgcccggtaagcctatgctgctgggtttcagtgattccagttatcagcaatttttccatgaggtgtaatctatgagctgcccggttattgagctgacacaacagcttattcgccgcccttccctgagtcctgatgatgcaggatgccaggctttgttgattgaacgtttgcaggcgatcggttttaccgttgaacgcatggactttgccgatacgcagaatttttgggcatggcgtgggcagggtgaaacgttagcctttgccgggcataccgacgtggtgccgcctggcgacgccgatcgttggatcaatcccccgtttgaacccaccattcgtgacggcatgttattcgggcgcggtgcggcagatatgaaaggcagcctggcggcgatggtggtggcggcagaacgttttgtcgcacaacatcccaaccatacggggcgactggcatttctgatcacctctgatgaagaagccagtgcccacaacggtacggtaaaagtcgtcgaagcgttaatggcacgtaatgagcgtctcgattactgcctggttggcgaaccgagcagtatcgaagtggtaggtgatgtggtgaaaaatggtcgtcgcggaagtttaacctgcaaccttaccattcatggcgttcaggggcatgttgcctacccacatctggctgacaatccggtacatcgcgcagcacctttccttaatgaattagtggctattgagtgggatcagggcaatgaattcttcccggcgaccagtatgcagattgccaatattcaggcgggaacgggcagtaacaacgttattccgggtgaactgtttgtgcagtttaacttccgcttcagcaccgaactgactgatgagatgatcaaagcgcaggtgcttgccctgcttgaaaaacatcaactgcgctatacggtggattggtggctttccgggcagccatttttgaccgcgcgcggtaaactggtggatgcggtcgttaacgcggttgagcactataatgaaattaaaccgcagctactgaccacaggcggaacgtccgacgggcgctttattgcccgcatgggggcgcaggtggtggaactcgggccggtcaatgccactattcataaaattaatgaatgtgtgaacgctgccgacctgcagctacttgcccgtatgtatcaacgtatcatggaacagctcgtcgcctgatgagtggttctgcaagaggaaataagcatggactggctggctaaatattggtggattctggtgattgtctttttggtaggcgtcctgctgaacgtgattaaagatctcaagcgcgtcgaccataagaaatttctcgccaacaagccggagcttcccccgcatcgtgatttcaacgataagtgggacgatgacgacgactggccgaaaaaggatcaaccgaagaagtaagctgagtgctcaaccgtaggccggataaggcgttaacgccgcatccggcaatggtgaacgatgcctgatgcgacgctcacgcgtcttatcaggccaggtaatctgtcttttacatcatttcaatcacatcatcatcgccaggcttaccgccacttagcgcttcgtcgaaataatgtttcggaatggtataacgcaagtgatccagggcaaattgcatactgcgattgtcgatcgcatggcctaaatcctccacgatatccagcgtcacgtcaccaccggcactgattaacgcttcctgcgccgcaaccgcatgcgccagatcgataaccggatcttcaccgccatgaatcaggtgaattgtcgtggctgtagacgcagtttccggcaggctcgcatagcgtccgttaaaagcaatgacgcgactagcaaggcccggttcggctttaatgctctccagcaccataatcgcgccttgagagaaaccgatgagcgccgtggcgttagcccctactccgctctgtttctgccagtagcgcaccgtttcaataaacgtcggcatgatcgcatccacacgcgcctggcgattatcttccgtaataccctgcacgctaaaccactgacgccccgccggattaccgctcggctccgcgccaccgacactcaccaccagcgcatcaggaaacagcggtgcaaaccagttgcctatttcccccattgccaccgggttatccccgacaccgtggaaaagcagtaacaactgttgcgcaggtttatccgggctttgaacaacaaaatggtcatgtttcatggcgaactccttaactgatgtcattaattttacgccgctgactcacaatgaccatgagataaaattgaaggagtcagtgaaataattgccattgcgttatgcgatcgcgcagacgctcagtgcgaacatcattaagtgcgaacagcgcctgcgcggcctcttcccgctgacggaccagtaacatcttgcggccactaagtttaagtgtggtacataactgcgcatcactggcgtttttctgtaaacgcccacgcagcgccggtaatgccagttcactggtttgtaacagacgcaataagcaacctaagctcgttaatagcggacgatgagcgaaagcaaaaccggccagttcaagccagtcgtcgtcagaaaggacggcatcgtttagtggatcaacaggaagcgtttcgccattccactgcgcgagagcttgcgcatcgcgacgtaaacggtaatgctcacgttcagccagctgtttacccgcatcactcatcggtaacagcgccatcgccgtatagcaaccgctgctggcttcccgatgattacccatccgcaccagcacaaaaccgcagcgttgccagaaacgccataactccccggtgtaaccaaaactcacgctaagatagtcgaggtcttgcgtatattgcaaagcaccagcaataagttgccgccctgtgccttcccgctgacgagccggatgaactgctatccggctgacccgccgtccacgcaatgtcgccgccagtggattgttgccgtgcgccgccaggctctgggccaccagattaccccgcgggcgacgaaaacctgcccataccgcctgactgagttgttgagataatccaccctcatccaccagccacagcgccccggcaatctcgttttcgccagccgcctgtaaaaaatgttgccctggtgcatccatcatccggcgtaaatccagcgggctagtccgatagtgcgcaccagacaagagctgataaacctttaacggcgtttctggatcgctttgccataacgtctgttcaaatgcggaaatgacaatattgccttgtggtgtatgggtgaagttttcatcgtcaaaaaccagtgcctcgctgaccattttttccagcgggcatccctgcgcccagcggatcggctgttgcagttcaaaacggtgtaaatgcggaaagcgagcgcaaaatttcagcaaaaaaccacgtccggtgccttcgtagccctgcaccgtagtggttaacaacgttcgaggaaaacggcttaccagttgatgcaacaatggcgcaggtatggctgcggcttcatcgaccaccagccagtcggcttgctcatcgctggctaacaaggcatccggcgcaataaagcgaaacttctcgcccgcaaattgtgccagtacatccgtactcgcttttgcgggcgcggtgacaatcgctctgcccgcaatacgagaaatgagttgccctgccaacgcgctcttaccgcgcccacgcgcagccgttaccgctgccacgcccggcggcatggtcattagctgctttaagagttgctgttgttctggttgtggtgcgccagtcgcggggtaccagtcagtacggggagtaaaatgcgccaagctgaatggctggttttgccgccagaggatagcctcgttatccgccgtaagtacgcgtttgagatgctggacaaaatgcggcgtcgcaatagggtcagggcaatcactccagcgcaggctgtcggcatcaggttggttttcccactcttcccatacagggagtaacaaaaccagccagcttcccgctttcaacgttccgctaagtgcggcaaaggcagcggcatcaaagccgtggcgggcgtcgaataccgcatgccggaactcgcgcccaagtaaagtttgtagtgcgctgggagaacagtggttttcagcatctggccgcgggctaatccacagccagtcgccaggtaaggcatcacgcaacttaagagtatgctcaaaacaccaaccctcttccccgctcaacaccagcaagcggcggatcccttcacgtttcatttgcgctgttaatgtgtgaagcgcagtcagttcagccatccctgccccggaagttaaatgcttttaccaaaagtattgcattgtgccggatcgccgctgtcgaaaccacgtttaaaccagctgtagcgttgctgagaagtgccatgagtgaaactgtctggtactactcgcccctgactttgctgttgtaaacggtcatcgccgatggcctgcgccgcgttcagcgcctcttccagatcgccggtttccagaacgccttgctgctgcatactatgcccccagacaccggcaaaacagtcggcctggagttccatacgcacagataagcggtttacttccgcctgcgtcgcgttttgttgcagttgacgaactttcggctcgatgcctaacagtttctgcacatgatgaccgacttcatgggcgataacgtacccctgggcaaaatcgccatccgcgccaagtttgtctttcatgtcatcatagaaggagagatcgatataaaccgtgccatccgccgggcaatagaacggccccattatggactggcccgccccgcagccggtacgcgtcattccacggtacatgaccagcttcggttgctgataggtcttacccatcttctcgaactgttgtccccaggtgtcttccgtggttgccagaatcacgctggtgaattttgcggcttcgtcttcatttgggctaatactccgcgtactttgttgttgggaaaccggctgcccggtcatcaacccggttaaatcaacaccatagtagcctgcaaccagcacgactatcagtaaaatcagcccgcctttaccgcttggcaggcgaaaaccgggaccgcccatagatggaccaccagagctgttgcgcctgtcttcaacattgtcactttcacgtcgcccttgccaacgcatagatacctcaacaatatattcattatagaaatgatcgtaggtggttcagaggaagattaccacaggaaagcgggatgaaatggcggaggaatgagcgttcaatgcatatattccgagagcggttgtcttgccgtgccagctgcacggcaagatgatgaacagaaaaatcagtccagctgtacacccaggcggcgggcgacggcttcataggcttcgatcaggccaccgaggctctggcggaaacggtctttgtccattttctccagcgtttctttgtcccacaggcggctaccgtccggggagaactcatcacccagtaccacttcgcctttgtacagaccaaattccagcttgaagtcgaccagaatcagaccagcatcatcgaacagttttttcagcacgtcgttcgctttgtaggtcagctctttcatacgcgccaggttctctttgctcacccagccaaaggtttcgcagtaagattcgttgaccatcggatcgtgcatggcgtcgtttttcaggaacagatcgaacagcggcgggttcagctcaataccttcttcgattccaagacgtttcaccagagagccagcagcacggttacgcacgacacactcaaccggcaccatatccagctttttcaccagacattcggtatcggagagcagacgctccatttgagtcgggatacccgcttcagccagtttgctcataatgaagtagttgaacttgttgttcaccatacctttgcgatcaaactgctcaatgcgcgcgccatcccctgcactcgtatcattgcggaattcgagcaccaacaggtccgggttttccgtgctgtatacggttttcgctttaccacgatacaactcagcttgcttttgcatctttatcactcctgggtgtgaattaacgttttaaaatcttttgctgtctggtgtgccggatgttttgtcggatgcggcgtgaacgccttatccgaactacgtccgacaaacaaatttcgtgcgaattaccgctaaaatcgcgttttcctgcagacgcacacgtttgcgtatcatatcagaaaaaagggccggatgattccagccctgtatttttacttgctaaacgcagcctggaagacagctaccagcgcgtcgttctgactctgagtcagagtatgacctttcggatcgatgaactgtaggctgctgcggttatctaaatcgccaacctgcagtttatagtcaccggatgccaggcctggatcgctcgcgcccagttcctgccagtcgctgtcagacagcggcttataagttacggccatgttgccctggctacgggtgctgtcggtcactttcatgcccactttttccagcgccgctggcagacgttgccaaaccacattgaacggcccgcgtacgaccagcattggtaaaccggtgtcatcagctgcactttgtacgtccatagtggtggaggcacgattttgcgcagcgttcgcggcgtcagtggcagatttatccagaccggcggaaataacgttcatcatctccgtgctgtaacgctgcatggaagccgcgtctgcaaccggtttgcccgcctgttccaggttcagcagtttaaccgtaaccgcctgctgataaccctgcggcttaacagagatttgataacgaccacgatactgctcgtcttcgtccagacggttccattgtacccaatcggtggtcagtgtctgaccagcatcatcacgttgggtgatggtgtagtttttcgcctgcagcacgctaaccacctgcggccacagagtattgccacgaccattttccaccagcaaactagcggtatcgcccgtgaactgggtacgcgcgccagaaaccagtgccagcggctgggctggtggacgaatgtccagcgccttaccgacagcaccactaccgttggtcaccgggattgcataatcaccggaggtcaccggcaaaatcattccagccggggcatgaagctccgcaagcggtgccgcttccaggtaggcttcatcaccactgacctgacgcttatagcgactgtcagaactacaggcagcgagtaataaaacaaggctaacacccgcaacctttgccaggcggctcttttgaacagagtaagccatcaaatctccctaaactttacagcaaaccggcatgcttaagcgccgctctgaccgtctcacgaccactgtcggtgattggtgtcattggcaggcgcagcgtatcggtcgccacaagacccagttccttacatgcccatttcaccgggattggattgggttcgacaaatagtttgttgtgtaatggcatcagacgctgattaataacgcgtgcctcggcaaaatgcccttctgctgccagtttgcacatctgggccatatcacgcgctgcgacgttagccgtaacggaaataaccccatgaccgcccaattgcatgaagtccagcgcgctcgcatcatcgccgctcagcagaacaaaatcatcactaaccagctctttgatctggtttacacgcgttaagttccctgttgcctctttgattccgataatattttttactttcgccagacggcccaccgtttccgggagcagatcgcagccagtacgggacggcacattatacagaatttgcggcaggtcagtatgctcagcgatggctttgaaatgctgatacaaaccttcttggctcggacgattgtagtaaggggttaccgtcaggcagccgacgataccactgtcattgaagcgctgcgtcaggctaatggcttccgcagtagcgttagcgccggtcccggcaattaccggaatgcgcccatcagccagatccagcgtcatcatcaccacatcagcatgttcgtcatgatttaaggtagcggactcgccagtggtgccaacagaaacgatcgcgctagtaccgctggcgacatgataatcaatcagttttttcaagctagcccgacagacattacctttttcatccatcggagtaacaatcgcgacaatacttcccgtgaacatgggccatcctctgtgcaaacaagtgtctcaatggtacgtttggtatggcattaaaagcaagcagacagaaccgttctgattgttgtatgcatgttttttttatgctttccttaagaacaactcaccccttaaaggaataaccagtttgacactgagtagccaacattatctggtgatcactgcgttgggtgccgatcgccctggaattgtgaacaccatcacccgtcatgtcagtagttgcggctgtaatattgaagacagtcgcctggcgatgctgggagaagagttcacgtttattatgctgctttccggtagttggaatgccattactctgattgaaagtacgttaccgttgaaaggtgccgaactggatcttttaatcgtgatgaagcgcacgacggcgcgtccgcgtccgccaatgccagcatctgtctgggttcaggtcgatgtggcagactccccgcatttaattgaacgcttcacagcacttttcgacgcgcatcatatgaacattgcggagctggtgagccgcacgcaacctgctgaaaatgaacgggctgcgcagttgcatattcagataaccgcccacagccccgcatctgcggacgcagcaaatattgagcaagcgttcaaagccctatgtacagaactcaatgcacaaggcagtattaacgtcgtcaattattcccaacatgatgaacaggatggagttaagtaatgaatccactgaaagccggtgatatcgcaccgaaatttagcttgccggatcaagacggagaacaagttaatttgaccgacttccagggacagcgtgttctggtttatttctacccgaaagccatgacccccggctgtaccgtacaggcctgcggcttacgcgataacatggatgagttgaaaaaagcgggcgttgatgtgctgggtatcagcaccgataaacccgaaaaactctcccgttttgcggaaaaagagctgcttaactttacgctcctgtctgatgaggaccaccaggtgtgcgaacaattcggcgtctggggtgaaaagtccttcatgggcaaaacctacgatggcattcatcgcatcagcttcctgattgacgctgatggcaaaatcgaacatgtctttgacgatttcaaaaccagcaatcaccacgacgttgtgctgaactggctgaaagaacacgcctgattactttgctccattccgtgctggctgcgcttgcggccagcatacctcacttctcgtgatcaagatcacattctcgctttcccctgcgacacgggtgtcgaatccattttttgctgaacgttaatgaccatcatttttgtaccgttcagaatccagttaatacataacttattgaatatattgagttaatcagaatggcatcctttatgcaatatgaaatgcaatgtttcatatcattttcaaggagccgacatgaaccgctttgtggtggccgaaccactgtggtgtacaggatgtaatacctgtctcgctgcctgtagcgacgtgcataaaacgcaaggtttacagcaacacccgcgcctggccctggcgaagacgagtacaatcactgcccctgtcgtgtgtcatcactgtgaggaagccccttgcctgcaggtctgcccggtcaatgccatctctcagagggatgatgcgatccaactcaacgaaagcctctgtattggctgcaagctttgcgccgtggtctgcccatttggcgcaatcagcgctagtggaagccgtccggtgaatgcccatgcgcaatatgtttttcaggctgaaggcagtctcaaagacggcgaagaaaacgcgccaacacaacatgctttgctgcgctgggaacctggtgtccagaccgtcgcggtgaaatgcgacctgtgtgatttcttgccagaaggtccggcctgcgttcgcgcttgcccgaatcaggcgttacggctgatcaccggtgatagcctgcaacgtcagatgaaagaaaaacagcgccttgccgcaagctggtttgccaatggcggggaggatcccctttccctcactcaggagcaacgctaatggatgccctgcaattattaacctggagcctgattctctatctgtttgctagtctggctagcctgtttttactcggtctggacagactggctattaagctttccggcatcacaagcctggtgggcggcgtgattggcatcatcagcggaattacgcaattacatgctggtgtaactttagtcgcccgttttgcccccccttttgaatttgccgatttaaccctgcgaatggatagcctcagcgcatttatggtgctggttatctccttgctggtggtggtttgttctctctatagtttgacttatatgcgcgaatacgagggcaaaggcgcggcggcgatgggcttctttatgaatattttcatcgcaagcatggttgccctgctggtgatggacaacgctttttggttcatcgtgctgtttgaaatgatgagcctgtcttcctggtttctggtcattgccaggcaggataaaacgagcatcaacgctggcatgctctacttttttatcgcccacgccggaagcgtgctgataatgatcgccttcttgctgatggggcgcgaaagcggcagcctcgattttgccagtttccgcacgcttagtctttctccggggctggcgagcgcggtgttcctgctggcctttttcggttttggcgcgaaagccgggatgatgccgttgcacagctggttgccgcgcgctcaccctgccgcaccaagccacgctagcgcgttgatgtctggcgtaatggtcaaaataggtattttcggcatcctgaaagtagcgatggatctgctggcgcaaacgggtttgcctctgtggtggggcattctggtgatggcgatcggcgcaatctccgcgctcctgggcgtgctatatgcgctggcggaacaggatatcaaacggctgctggcctggagtaccgtcgaaaacgtcggcattattttgctggcagtcggtgtggcgatggtcggtctgagtctgcacgacccgctgctcaccgtggttggactgctcggcgcactgtttcatctgctcaaccatgcgctgttcaaagggctgctatttctcggcgcgggagcgattattagccgtttgcatacccacgacatggaaaaaatgggggcactagcgaaacggatgccgtggacagccgcagcatgcctgattggttgcctcgcgataagtgccattcctccgctgaatggttttatcagcgaatggtacacctggcagagcctgttcagtctaagtcgtgtggaagccgtagcgctacaacttgcgggtcctattgctatggtaatgctggcagtcactggtgggctggcagtaatgtgcttcgtaaaaatgtacggtattactttctgtggtgcgccgcgcagtacacacgctgaagaggcacaggaagtgccaaatacgatgatcgtcgccatgctactgctcgcggcactctgcgtattaattgcgcttagtgccagttggctggcaccgaagataatgcatattgcccatgcgtttaccaatacccctcccgccactgtcgccagcggaatagcacttgtacccggcacgtttcatacacaggtcacccccagtttactgttgctgttactactggcgatgcctttgctgcctggcctttactggctgtggtgtcgtagccgccgcgcagcgtttcgtcgcacaggagatgcctgggcatgcggctacggctgggaaaatgcgatggccccgagtggcaatggcgtgatgcagccgctgcgtgtggtcttttctgcgctatttcgtctacgacaacagctcgaccctacgctgaggctaaataaaggtcttgcgcacgtcaccgccagggctcagagcacagaacccttctgggatgagcgggtgatccgccccatcgtgagcgccacccaacggctggccaaagaaatacagcatctgcaaagcggcgactttcgtctctattgcctgtatgtggtcgccgcactggttgtgctgctaatcgctattgccgtctaaggaaatcaccatgagacaaactctttgcgacggatatctggtcatttttgcgttagcacaggccgtgattctgctgatgctaaccccactttttacgggtatttcccggcagatacgcgcgcgtatgcactcccgccgcgggccggggatctggcaggattatcgcgatatccacaaactgtttaaacgccaggaagttgcgccgacatctagtggtctgatgttccgcctgatgccgtgggtattaatcagcagcatgctggtgctggcgatggccttaccactgtttattaccgtttccccttttgcgggcggcggcgatctgatcacccttatctatcttcttgccctgtttcgttttttctttgctctttccgggctggataccggaagtccgtttgcgggagtcggtgccagtcgcgagttgacgctcggcattctggtcgaaccaatgcttattctcagtctgctggtattggcgctgatagcaggttccacgcatatcgagatgatcagcaatacgctggcgatgggctggaacagcccgctaaccaccgtactggcgttactggcctgtggttttgcctgcttcattgagatgggaaaaattccctttgatgttgctgaagcagaacaggaattacaggaaggcccgctgaccgaatattccggtgccgggctggcgctagcgaaatgggggctggggctgaaacaggtcgtgatggcaagtctgtttgtggccctgtttctgccctttgggcgcgcgcaagaactttctctcgcctgcctgctgactagtcttgtcgttacgctgctcaaggttttgctgatttttgtactggccagtatcgcagaaaacacgctggcacgcgggcgttttttactcattcaccatgtgacctggcttggcttcagccttgctgcgcttgcatgggtcttctggttaaccggtctgtaaggagcactgacggaatatggaaaatcttgctctgacgacgttattgctgccttttatcggcgcactggtcgttagctttagcccacaacgtcgggccgccgaatggggggttttgttcgccgcgctgaccacgctgtgcatgttgagtctgatctccgcgttttatcaggccgataaagttgccgtcacgttgacgttggtcaacgtgggggatgtggcgttgtttggcctggtcattgatcgcgtgagtacgctgattctgtttgtggtggtgtttctcggtttgctggtcacgatctactccacgggttatctgacggataaaaatcgcgaacacccgcataacggcacgaatcgttattacgcatttttactggtgtttatcggcgcgatggcgggactggtactctccagcacgctgctcggtcagttgttgttttttgaaattacaggcggctgctcctgggcgttgatcagttattaccagagcgataaagcgcagcgtagtgcactaaaagcgttacttatcactcatatcggcagcttggggttgtatcttgccgccgccacgctgtttttgcagaccggaacgtttgcgcttagcgcgatgagcgagttacacggcgacgcacgttatctggtttatggcggcatcctgtttgccgcgtgggggaaaagcgcccagctaccgatgcaagcgtggctaccggacgcaatggaagcgccaacaccgatcagcgcctatctccacgccgcaagcatggtgaaagtgggcgtttacatttttgcccgcgctattatcgacggcggcaatatcccgcatgtgattggcggcgttggcatggtcatggcactggtcaccattctttatggctttctgatgtatttgccacagcaggatatgaagcggttgctagcctggagcaccatcactcaacttggctggatgttcttcggcttgagcctctccatcttcggcagccggctggcgctggagggcagcatcgcctacatcgtcaaccacgcgttcgctaaaagcctgtttttccttgtagcaggtgcgctgagttacagctgcggcacgcgcttgttgccgcgtctgcgtggcgtattgcacaccctgccgttgccaggcgtgggtttctgcgtggcagcgctggcgattaccggcgtgccgccgttcaacggcttcttcagtaaattcccgctgtttgctgccggttttgcgttgagtgtggagtactggatcctgctgcccgccatgattcttctgatgattgaaagcgtcgccagtttcgcctggtttattcgctggtttggtcgcgttgtgcctggcaaaccgagcgaggccgtcgccgatgccgcaccgctgccaggaagtatgcgcctggtgttgattgtactgattgtgatgagcctgatttccagcgtaatcgccgcgacctggttgcagtaaggagatgatgaatgaccggttctatgatcgtaaataatctggcgggactgatgatgctgacaagcctgtttgtgattagcgtcaaaagctatcgcctgagttgcggattttacgcctgccagagtctggtgctggtgtctattttcgccactctcagctgcctgttcgccgcagagcaactgctgatctggtccgccagcgcctttatcaccaaagtgctgctggtaccgttaatcatgacttacgctgcacgaaatattccccagaacatcccggaaaaagcgttattcggtccggcaatgatggcactgctcgcggcgttaattgtcctgctttgcgcatttgtcgttcagcccgtgaagctaccgatggctaccgggctgaaaccggcgctggcggtagcgttaggtcattttctgcttggcctgctgtgcattgtcagccagcgcaatatcctgcggcaaatttttggttactgcctgatggaaaacggctcccatctggtgctggcgcttcttgcctggcgagcaccggaactggtggaaataggtatcgctaccgacgccatcttcgccgtcattgtgatggtgttactggcaagaaaaatatggcgtacccacggcacgctggacgtgaacaacttgaccgcgctgaagggataatgagatgagttattctgtgatgttcgctttactcctgctcacgccgctgctttttagcctgctctgttttgcctgccggaaacggagactttctgcgactcgcacggtgaccgtattacatagcttagggatcacactgctgctgattctggcactctgggtggtccaaactgccgctgatgcaggagaaatattcgctgcgggactgtggcttcatattgatggtctgggcggtttgttcctcgccattcttggtgtgattggctttctcaccggtatttacagcattggctacatgcgtcatgaagtggcacacggcgagcttagtcccgttacgctgtgcgattactacggtttcttccatctgtttttgttcaccatgctgctggttgttaccagcaataacctgattgtgatgtgggcggcgatcgaagccaccaccttaagcagcgcgtttctggtaggcatttacggtcagcgtagtagcctggaagctgcatggaagtacatcattatttgtactgttggtgtcgcttttggtctgttcggtaccgtgctggtatacgccaacgccgccagcgttatgccgcaggcagaaatggcgatattctggagcgaggttcttaagcaaagctccttgcttgacccaacattaatgctgttggcctttgtgtttttgctaattggctttggtaccaaaaccgggctatttcccatgcacgcctggctgccggatgctcacagtgaagcgccgagtccggtcagcgccctgctctccgccgtattgctgaactgcgcgctgttggtgctgattcgctattacatcattatttgccaagccatcggcagcgatttccccaaccggttgttgctcatcttcggcatgttgagcgttgccgtggcggcatttttcattctggtacagcgggacattaagcgtctgctggcgtactccagcgtggagaacatggggctggtcgcggtggagctaggcattggcgggccgctgggaatttttgccgcgctgctgcacatcttaaaccacagtctggcaaaaacgctgctgttctgcggttccggcaatgtactgctcaagtacggcacgcgcgatctcaacgtcgtctgtgggatgctcaaaatcatgccatttaccgccgtgctgtttggcggcggtgcgctggcgctggcagggatgccgcccttcaacatttttcttagcgaatttatgaccattaccgccggactggcacgtaatcacctgctgattatcgtcctgctgttattgctgttaacgctggtgctggcgggcctggtacggatggctgcgcgggtgttaatggcgaaaccgccgcaggccgttaaccggggtgatctcggctggttgaccaccagcccaatggtgattctgctggtcatgatgctggcgatgggaacgcatattccacaacctgtcatcaggatcctggcgggcgcttccactatagtcctcagtgggacgcacgatctgcctgcacaacgtagcacctggcatgattttttgcctagtggcaccgcatctgttagcgagaaacacagtgaacgttaatagtagcagtaatcgtggcgaagcgattctcgccgccctgaaaacgcagttccccggcgcggtgctggatgaagagcgacaaacgcctgaacaggtcaccattacggtgaaaatcaatctgctgcctgacgttgtacagtatctttattatcaacatgatggctggcttccggtcctgtttggcaacgacgagcggacacttaacggtcattacgcggtttattatgcccttagtatggaaggggccgaaaaatgctggattgtggtgaaggcgctggtcgatgccgacagtcgggagtttccgagtgtcacaccgcgcgtccctgccgcggtctggggcgagcgagaaattcgcgatatgtacgggctgattccggttggcctgccggatcagcgtcgcctggtgttgcccgatgactggccggaagatatgcatccgctgcgcaaagatgcgatggattatcgactgcgccctgaaccgacgactgattccgaaacgtatccgtttatcaatgagggcaacagcgatgcgcgggtgatccctgtcggcccgctgcatatcacctccgatgaaccgggtcacttccgcttgtttgtggatggcgagcaaattgtcgatgctgattaccgcctgttttatgtccatcgcggcatggagaaactggcagaaacgcggatgggctacaacgaagtgaccttcttaagcgaccgcgtgtgtgggatttgcggttttgcccacagtgtggcctataccaatagcgttgaaaatgcactggggattgaggtgccgcaacgagcacatactattcgcagcattctgctggaagtcgaacggctacacagtcatttgcttaaccttggcctctcctgccatttcgttggttttgataccggctttatgcaatttttccgcgtgcgggaaaagagcatgacgatggcggaattgctgatcgggagccgtaaaacctacggtctgaatctgattggtggtgttcgccgcgatattctcaaagagcaacgtctgcaaacgctgaaactggtgcgcgagatgcgcgccgacgtgagcgagctggtagagatgctgcttgctacgccgaatatggaacaacgcactcagggcattggcattctcgaccgacaaatcgcccgtgatttgcgctttgatcacccctacgccgactacggcaatattccaaaaacactgtttacctttaccggcggcgatgttttctcccgcgtgatggtccgtgtcaaagagacgtttgatagcctggcaatgctggaatttgccctcgacaacatgccggataccccactgctgaccgaaggctttagctataaacctcacgcattcgcgctgggctttgttgaagcgccacgcggtgaagacgtgcactggagcatgctcggtgataaccaaaaattgttccgctggcgctgccgtgccgccacctacgccaactggccggtgttgcgttacatgctgcgcggcaataccgtttctgacgcaccgctgattatcggtagccttgatccctgctactcctgtaccgaccgtgtgacgctggtagatgtgcgcaagcgccagagtaaaaccgtgccgtataaagagatcgaacgctacggcattgatcgtaaccgtagcccgctgaagtaaggacagaagatgctgaagttactgaaaactattatgcgcgccggaaccgcgacggtgaaatatcccttcgcgccactggaggtcagccctggctttcgcggaaaaccggacctgatgcccagccaatgtattgcctgcggtgcctgcgcctgtgcttgtccggcaaatgcgctgactatccagaccgacgaccagcaaaatagccgcacctggcagctctatctggggcgttgtatttactgcggacgttgtgaagaagtgtgcccgaccagagccatccagcttaccaataactttgaactgaccgtcaccaataaagccgatctctatacccgcgcgacgttccatctacaacgttgcagccgttgcgaacgcccgtttgccccgcaaaaaaccatcgcactggctgctgaattgttagcacagcaacaaaatgcgccacaaaaccgcgaaatgttgtgggcgcaagcgagcgtctgcccggaatgcaaacaacgcgcgacgctgatcaacgacgatacagatgtactgctggtggctaaggagcagctatgagtccagtgcttacacaacatgtcagccagcccatcacgctggacgagcaaacgcaaaagatgaagcggcatttgctacaggatatccgtcgcagcgcttacgtttatcgcgtcgattgcggcggctgcaacgcctgtgaaatcgaaatttttgctgccattacaccagtattcgacgcagaacgttttggcattaaggttgttagtagtccgcgtcacgccgatattttgttatttactggcgcagtcacccgggcgatgcgtatgcctgcacttcgggcgtatgagtctgcccccgatcataaaatttgtgtttcctacggcgcgtgcggtgtcggcggcggtattttccacgatctctacagcgtctggggcggtagcgacaccattgtccccattgatgtttggatccccggctgcccgccaacaccggccgccaccattcacggtttcgccgtggcgctcggtttgctgcaacagaagattcacgctgtggattatcgcgatcccaccggggtgactatgcaaccgttgtggccgcagatcccgccaagtcagcgtatcgccattgagcgagaagcgcggcggctggcgggctatcgtcaggggcgagaaatttgcgatcggctcctgcgccatttaagcgacgatcctacaggaaatcgggttaacacctggttgcgcgatgccgacgatccacgtctcaatagtatcgttcagcaactctttcgcgtactccgggggttacatgactgaagagtgcggggaaattgttttctggacgctgcgaaaaaagtttgtcgccagtagcgacgagatgccggaacacagctctcaggtaatgtattacagcctagctatcggccatcacgttggcgtgattgattgtctgaatgtcgccttccgctgcccactgacggaatacgaagattggcttgcactggtcgaagaggagcaagcccgacgtaagatgctgggggtgatgacttttggtgagattgttattgacgccagccacaccgccctgttgacccgggcattcgcgccactggcggatgacgcgacgtctgtgtggcaggcgcgtagcattcaattcattcatctgttggatgaaattgtgcaggaaccggccatctatctgatggccagaaaaattgcgtgagaaggatttctcattaataaggactgttgatggctatgagtgacgaggcgatgtttgccccgccacaaggaataacaattgaagcggtaaacggaatgctcgcggagcggttagcacagaaacacggcaaggcgtctttattacgcgccttcatcccgctgccgccgccgttcagcccggtacaacttattgaactgcatgttctcaaaagcaacttctattaccgctaccatgatgatggcagcgatgtgacggcaacaacagagtatcagggcgagatggtcgattatagccgtcacgccgtccttctcggcagtagtggaatggcggagctacgctttattcgcacccacggcagtcgttttacttcccaggattgcacactgtttaactggctggcgcggataatcaccccggttctgcaaagttggctcaatgatgaagaacagcaggtggcgctgcgtttgctggagaaagatcgcgatcatcatcgggtactggttgatattactaatgcagtgctgagtcatcttgatctcgacgatctgatcgctgacgtcgctcgtgagatccatcattttttcggtctggctagtgtcagtatggtactgggcgatcatcgaaagaacgagaagttcagcctgtggtgcagcgatctttctgccagtcattgtgcgtgtctgccacgctgtatgcctggcgaaagtgtattgctgacacaaacgctacaaacccgacaaccgaccttgacgcaccgtgcagatgatctgtttctctggcaacgcgacccgttattactcttacttgcatctaacggctgcgaatctgcgctccttataccgcttacctttggcaaccatacaccgggtgcattgttgctggcgcatacctcttccactctctttagtgaggaaaactgccagctactacaacacatagccgatcgcatcgctattgccgttggcaatgccgatgcctggcgtagcatgaccgatttgcaggaaagtttgcagcaagaaaaccaccagcttagcgagcagctccttagcaatctgggcatcggtgacattatctatcaaagccaggcaatggaagacctgctccagcaggtagatattgtggcgaagagcgacagtacggtgttgatttgtggtgaaaccggaactggcaaagaggtgatcgccagagcgatccatcaacttagcccgcgacgcgacaagccgctggtcaaaatcaactgcgctgccatccccgccagtcttctggaaagtgagttattcggtcatgacaaaggggcgtttactggtgcgattaatacccatcgtggtcgttttgaaattgccgatggcggcacgttgtttctcgatgaaattggcgatctgccgttagaacttcagcctaaactgctgcgcgtattgcaggagcgggagattgagcgtctcggcgggagtagaacgatcccggtgaatgtcagagtcattgccgccaccaaccgtgatttgtggcaaatggttgaagatcgccagtttcgcagcgatctcttttatcgcctgaatgtcttcccactggaattgccgccgctacgcgaccgtccggaagatatccctcttttagcaaaacatttcacgcaaaaaatggcgcgccatatgaatcgcgcaattgacgccatcccgaccgaggcactacgccagttgatgagctgggattggccgggcaacgtgcgcgagctggaaaacgtgattgagcgggcggtactgttgactcgtggtaacagtctgaatttacatctaaatgtccgacaaagccgtttactgccgacgctaaatgaagatagtgcgcttcgcagtagtatggcgcagttactgcacccgacgacgccagagaatgacgaagaagaacgtcagcgcattgttcaggtattgcgagaaaccaatggcattgttgccgggccccgtggcgcagcgacgcgattagggatgaagcgcaccacgctgctgagtcgaatgcagcggctggggatcagcgttcgcgaggtgttgtaatctgcttttgcaggagtatgcatgagaaacaaactctctttcgacttgcagttgagcgccagaaaagcggcaatcgctgaacggattgccgcccataaaattgcccgcagtaaagtgagcgtctttttaatggcgatgtccgctggcgtgtttatggcgatcggatttactttttacctttccgttatcgccgatgccccgtctagtcaggcattaacccatctggtgggcggcctttgctttacactcggctttattttgctggcggtttgcggcaccagcctgttcaccagcagcgtaatgacggtgatggcaaaaagtcggggcgttattagttggcgaacttggctgattaacgcacttctggtggcctgcggtaatctggcaggtattgcctgtttcagtttgttaatctggttttccgggctggtgatgagtgaaaacgcgatgtggggagtcgcggttttacactgcgccgagggcaaaatgcatcatacatttactgaatctgtcagcctcggcattatgtgcaatctgatggtttgcctggcgctgtggatgagttattgcgggcgtagcttatgcgacaaaatcgtcgccatgattttgcccatcaccctgtttgtcgccagtggctttgagcactgtatcgccaatttgtttgtgattccgttcgccattgccattcgccatttcgcccctccccccttctggcagctggcgcacagtagcgcagacaattttccggcactgacggtcagccattttattaccgccaatctgctcccggtgatgctgggtaatattatcggcggtgcggtgctggtgagtatgtgttatcgggctatttatttacgtcaggaaccctgaaaaatcagcccggcgaaacagttcgtcgggctgaagattattcttgcgcgatttgcccatcgggccaggcatgaatcacggctttgatcagcgtcgccaacggaatggcgaagaatacgccccagaatccccacaaaccaccgaagatcaccacgcttaaaataatcaccagcggatgcaggttaaccgcttcggagaacaacaccggcactaacaggttgccgtccagcgcctgaataatcagatacaccgcgaagcagctccagaattcagtacctgcgccaaactggaatagcgccacgccaaccaccggaatggtcaccacaaatgcgccaatgtacggaataagaacgctgaagccgaccagcactgccagcagcaggctatagttcagcccgaagagcaagaaccccagccaggtggcgatccccaccacgatcatctccagcactttgccgcggatatagttggtgatttgttgattcatctccttccacacctgtcctgccagcccacggttacgcggcagcacccggcgaacggcgttcagcatctgctctttgtctttcagcaggaagaagaccatcaatggcaccagcaccagatagacggctatggtcagcaaaccgaccaggctggcgagggaaattttcaccacgctatcgcccatggtcagcatccgactgcgcatattttcggccattgcatcaataatgcccgcgtccattaacgccggatagcggcgcggcaacgtggcggcaaagtcagaaagcttattgagcatccccggcatatcgcggattaagtagatgccctgttgccaggcgataggcagtaccacgaacgccatcagtagcaatataccgacgaaaaccaccaatacaatgctcgtcgcccagcggcgggagcagccaatagattgcagacgcacggttggccattccagcaaataggccagcacaatagccaccagcaacggagcaagcaggccactaaagaaaaagataatgccaaatccggcaactaaaataaccagcaaggcaatcgcttccgggtcgctaaaacggcggcgataccattgcatcaacatttcgagcataaagaccttccctgaacctcaagagcgggattgcgatccgcaattgtatcgaaatgtcacaaaaaagacttcgctttttatgacggattcaggaaactgaaaagtcatttgagtgggctaatcttcgccgttacactcaaaggcggcgcggtgggaacgatatttcacagtatcggtcaaatgactatctccagaaatacaggatagaggttatgttcaggcagttgaaaaaaaacctggttgcaaccctcattgctgctatgaccattggtcaggtagccccggcgtttgccgacagcgcagacaccttgccggatatgggaacctccgcaggaagcacgctttccattggtcaggaaatgcagatgggcgactattatgtccgccagctacgcggcagcgcgccgttaattaatgacccgctgttaacgcaatatattaatagcctggggatgcgtctggttagccatgccaatagcgttaagacaccgtttcatttttttctgatcaacaacgacgaaattaacgcctttgctttctttggcggcaacgtggtgctgcactctgccctgttccgttattccgataacgaaagtcaactggctagtgttatggcgcacgaaatctcccacgtcacccaacgtcacctggcgcgagcgatggaagatcagcagcgcagcgcgccgctgacctgggtcggcgcgttaggttctattttactggcgatggccagtccgcaggcggggatggcggcgctgaccggtacactggcgggaacgcgtcaggggatgatcagtttcacccagcaaaatgaacaggaagcggaccgcattggtattcaggtgctgcaacgcagcggattcgatccgcaggcgatgccaaccttcctcgaaaaattactcgatcaggcgcgttactccagccgcccgccggaaattttattgactcacccgttgccggaaagtcgtctggcagatgcccgcaaccgtgctaatcagatgcgcccgatggtggtgcagagcagcgaagatttctatctggcgaaagcgcgcacactggggatgtataattccggacgtaaccagctcaccagtgatttgctggatgaatgggcgaaaggaaacgttcgtcagcaacgagcagcacaatatggtcgtgctttacaggcgatggaagccaataaatacgacgaggcgcgtaaaacgctgcaaccgttactggcggcagaacctggcaacgcatggtatctcgatctggctactgatatcgatcttgggcaaaacaaagccaatgaggcgatcaatcgtctgaaaaatgcccgcgatttacgcaccaatccggtgttgcagctcaacctggcgaacgcttatttgcaaggcggtcaaccacaagaagcggccaatattctgaatcgctacacctttaataataaagatgacagcaacggctgggatttgctggcacaggcggaagccgcgctaaataaccgcgatcaggagctggctgcgcgagcagaaggttatgcgctcgccggacgactcgatcaggccattagcctgttgagtagcgccagtagccaggtgaaattaggcagcctgcaacaagcgcgttacgatgcgcgcatcgaccagttgcgccagctgcaggaacgctttaagccttataccaagatgtaattcgcattaaaggaagaacaatgaccaaacaggtaaaaatctaccataacccacgctgtagtaagagccgggaaacgctgaacctgctgaaagaaaacggcgtggagccagaagtggtgctctaccttgagacacccgccgatgcggcaacgctgcgcgatttgctgaaaatactggggatgaatagcgcccgtgaattgatgcgccagaaagaggatctttataaagaactgaacctggctgacagtagccttagcgaagaggcgctgattcaggcaatggtggataatccgaagctgatggagcgcccgattgtggtcgcgaatggcaaagcgcggattggtcgtccaccggagcaggtactggaaatcgtgggttaagatgtgctccatcgctagttgaagcacattgccggatgcgacgcttgccacgtcttatccggcctacgaatactatggattaacttcgcgtagttcggataaggcgttcgcgccgcatccgacaataaacaccttatttacaacttcagaatttctttcacaaacggaatggtcagcttacgttgcgcggtaatgctcgcacgatccaactgatccaacgtcataaatagcgtgcgcatttctctgtcgagccgcttcagcaagaaacgccccacatcttccggcagttcaaaaccacgcaaacgcgcgcgtaactgtagcgcctgcaacttatcttcatcagaaagtggctgcaatttgtagatctgcccccagtcgagtcggctcgcgagatccggtaatcccagattcaactgccgcggtggacgatcgccggtgatcaacaaccgtgttttgccgctttccagaattcgattgtagagatcgaaaatcgccatctcccacaactcatcgcctgcaatacactcaatgttgtcgatacagaccaggctcaaatgctccataccgtcgagcacttccggaacaaaccaggtgcgtttatccagcgggacatagcccaccgcatcgccacgctggctcaattccgcgcaagccgcgtgcagcagatggctgcgccccgcgccttcgcgtgcccagagatagatgtaaccgctatgttcctgacgcagcacgttttgcagcgcggccagtaaagaggagttatcccccggccagaaacttgcaaaggtttcgtcgtcaggaagataaagtggcaaagagagctgtgccggtgtgttcagagatacctcaaccaggatttcacaaaatcggctgaagtttaccacagaatcccatgatgtttgaaccgggcagcaacactgcccggtcggtacattatttgtctgttatatccgcgtcttctgcgtccagcaccacttcttcagggcgcagcacactgatcagtttgaagatcaaacttaagccgataccgacgatggtcgccagcgccataccttttaactccgccgcgccgatgtttaccttcgcgccactgacgccgatgatcaaaatcacggaagtcaggatcaggttctgtgctttgttgtaatccactttgctttcgatcaaaacacgaataccggaagcaccgatgacaccataaagcagcaggctaacgccgcccatcaccggcaatgggatcatctggatagcggcagccagtttaccgacgcaggaaagcaggatagcgaaaatcgccgccccgccgataacccaggtactgtaaacacgggtgatcgccatcacgccaatgttttctccgtaagtagtatttggcgtagagccaaagaagccggaaatcacggtgctcaagccattagcaaacatgctacggtgcagacctggatcgcgcagcagatcttttttgacgatattagccgttactaccaggtgccctacgtgttcggcaataaccactaacgccgctggcagaatagtcagaatggcaaaccactcgaagcgcggcgtatagagggttggcagcgcaaaccagtgagcattaataatcggcgtggtatcgacaattcccattgcgaaagagagcgcgtaccccaccagcacgccaattaaaatcgggataattgccaggaaaccacgaaacagcacggaacctaaaaccgtgaccgccagggtggtaatagagatgatgatggttttggagtctggcgtttgcccttcagccgggagtaaacccgccataccggcagctacgcccgccagctccagaccgatgacggcaacgattgcgcccattgccgcaggtggaaacagcacgtccagccagccggtccccgctttcttcacgataaaagaaaccaggcagaacagcacgccgcacataataaagccgcccagcgcgacttcataccctaacggcaacagtaacaataccggactaataaaggcaaagctggaaccaagataagccggaattttccctttacagatgaagagatacagcagcgttccaataccgttaaataacagtacagtcgccgggttaatatgaaataagacgggcaccaggacggttgcaccaaacatggcgaacaaatgttgcaaactaagcgggattgtctgtaaaagtggcggtctttcactcaccccgatagcacggcgcgtcatagtattatcctctgtattatgtgttataggcgctttactcaaaaaaaagccgactcttaaagtcggctttaattatttttattctttatttcgtaccaaagattttgtcaccggcatcgccgaggcccggaataatgtatccgtgctcgttcagtccctgatcaatgcttgcggtatacagttcgacgtccgggtgcgctttttccagcgcagcgataccttctggcgcagctaccagcaccagaactttgatgctgctgcagcccgcttttttcagcaggtcgatggtcgcgataacggaaccaccggttgccagcattgggtcaacgatcagcgccatacgctcatcgatgttagaaaccagtttctggaagtacggtaccggctccagcgtttcttcattacggtacataccgacaacgctgatgcgcgcgctcggaacgttttccagcacaccgtccatcataccaagacccgcacgcagaattggcacaacggtaattttcttacctttgatctggtcgatttctaccgggccgttccagccttcgatagttactttttccgtttcgaggtcggcggtcgcttcgtaagtcagcaggctacccacttcggaagcgagttcgcgaaagcgcttggtgctgatatcttgctcacgcatcagtcccagcttgtgtttgacgagtgggtgtttgacttccacgatcttcatactctttctcctttgaggggcagccacaaaaaaaatcgacggattatacctcctttcttcaaggcggcaatattcttttcgttgactttagtcaaaatgataacggtttgagataaagttattttatattcagatggttatgaaagaagattattccatccgaaaactaacctttaccctggcacaagtcttctttcgccgcgcgcctggggaaaagacgtgcaaaaaggttgtgtaaagcagtctcgcaaacgtttgctttccctgttagaattgcgccgaattttatttttctaccgcaagtaacgcgtggggacccaagcagtgaccgataaaacctctcttagctacaaagatgccggtgttgatattgacgcgggtaatgctctggttggaagaatcaaaggcgtagtgaagaaaacgcgtcgtccggaagtgatgggcggtctgggcggcttcggtgcgctgtgtgcattgccgcaaaaatatcgtgaacccgtgctggtttctggcactgacggcgtaggtaccaagctgcgtctggcaatggacttaaaacgtcacgacaccattggtattgatctggtcgccatgtgcgttaatgacctggtggtgcaaggtgcagagccgctgtttttcctcgactattacgcaaccggaaaactggatgttgataccgctagtgcggtgatcagcggcattgcggaaggttgtctgcaaagtggctgtagtctggtgggtggcgaaacggcagaaatgccggggatgtatcacggtgaggattacgatgtcgcgggtttctgcgttggcgtggtagaaaaaagtgaaatcatcgacggctctaaagtcagcgacggcgatgtgctgattgcactcggttccagcggtccacacagcaacggctatagcctggtgcgcaaaattcttgaagtcagcggttgtgatccgcaaaccaccgaacttgatggtaagccattagccgatcatctgctggcaccgacccgcatttacgtgaagagtgtgctggagttgattgaaaaggtcgatgtgcatgccattgcgcacctgaccggcggcggcttctgggaaaacattccgcgcgtattgccagataatactcaggcagtgattgatgaatcttcctggcagtggccggaagtgttcaactggctgcaaacggcaggtaacgttgagcaccatgaaatgtatcgcaccttcaactgcggcgtcgggatgattattgccctgcctgctccggaagtggacaaagccctcgccctgctcaatgccaacggtgaaaacgcgtggaaaatcggtatcatcaaagcctctgattccgaacaacgcgtggttatcgaataatgaatattgtggtgcttatttccggcaacggaagtaatttacaggcaattattgacgcctgtaaaaccaacaaaattaaaggcaccgtacgggcagttttcagcaataaggccgacgcgttcggccttgaacgcgcccgccaggcgggtattgcaacgcatacgctcatcgccagcgcgtttgacagtcgtgaagcctatgaccgggagttgattcatgaaatcgacatgtacgcacccgatgtggtcgtgctggctggttttatgcgcattctcagcccggcgtttgtctcccactatgccgggcgtttgctgaacattcacccttctctgctgccgaaatatcccggattacacacccatcgtcaggcgctggaaaatggcgatgaagagcacggtacaagcgtgcatttcgtcaccgatgaactggacggtggcccggttattttacaggcgaaagtcccggtatttgctggtgatagcgaagatgacatcaccgcccgcgtgcaaacccaggaacacgccatttatccactggtgattagctggtttgccgatggtcgtctgaaaatgcacgaaaacgccgcgtggctggatggtcaacgtctgccgccgcagggctacgctgccgacgagtaatacccccgtaattaaagcgccagctctgccgctggcgtttttcaattcacctgtaaatcgcaagctccagcagtttttttcccccttttctggcatagttggacatctgccaatattgctcgccataatatccaggcagtgtcccgtgaataaaacggagtaaaagtggtaatgggtcaggaaaagctatacatcgaaaaagagctcagttggttaagcttcaatgaacgcgtgcttcaggaagcggcggacaaatctaacccgctgattgaaaggatgcgtttcctggggatctattccaataaccttgatgagttctataaagtccgcttcgctgaactgaagcgacgcatcattattagcgaagaacaaggctccaactctcattcccgccatttactgggcaaaattcagtcccgggtgctgaaagccgatcaggaattcgacggcctctacaacgagctattgctggagatggcgcgcaaccagatcttcctgattaatgaacgccagctctccgtcaatcaacaaaactggctgcgtcattattttaagcagtatctgcgtcagcacattacgccgattttaatcaatcctgacactgacttagtgcagttcctgaaagatgattacacctatctggcggtggaaattatccgtggcgataccatccgttacgcgctgctggagatcccaagtgataaagtgccgcgctttgtgaatttaccgccagaagcgccgcgtcgacgcaagccgatgattcttctggataacattctgcgttactgccttgatgatattttcaaaggcttctttgattatgacgcgctgaatgcctatagtatgaagatgacccgcgatgccgaatacgatttagtgcatgagatggaagccagcctgatggagttgatgtcttccagtctcaagcagcgtttaactgctgagccggtgcgttttgtttatcagcgcgatatgcccaatgcgctggttgaagtgttacgcgaaaaactgactatttcccgctacgactccatcgtccccggcggtcgttatcataattttaaagactttattaatttccccaatgtcggcaaagccaatctggtgaacaaaccactgccgcgtttacgccatatttggtttgataaagcccagttccgcaatggttttgatgccattcgcgaacgcgatgtgttgctctattatccttatcacacctttgagcatgtgctggaactgctgcgtcaggctagcttcgacccgagcgtactggcgattaaaattaacatttaccgcgtggcgaaagatagtcgcatcatcgacagcatgatccacgccgcacataacggtaagaaagtcaccgtggtggttgagttacaggcgcgtttcgacgaagaagccaacattcactgggcgaagcgcctgaccgaagcaggcgtgcacgttatcttctctgcgccggggctgaaaattcacgccaaactgttcctgattagtcgtaaagaaaacggtgaagtggtgcgttatgcacacatcgggaccgggaactttaacgaaaaaaccgcgcgtctttatactgactatagcttgctgaccgccgatgcgcgcatcaccaacgaagtacggcgggtatttaactttattgaaaacccataccgtccggtgacatttgattatttaatggtaagcccgcaaaactcccgccgcctattgtatgaaatggtggaccgcgagatcgccaacgcgcagcaagggctgcccagtggtatcaccctgaagctaaataaccttgtcgataaaggcctggttgatcgtctgtatgcggcctccagctccggcgtaccggttaatctgctggttcgcggaatgtgtagcctgatccccaatctggaaggcattagcgacaacattcgtgccatcagtattgttgaccgttaccttgaacatgaccgggtttatatttttgaaaatggcggcgataaaaaggtctacctttcttccgccgactggatgacgcgcaatattgattatcgtattgaagtggcgacgccgctgctcgatccgcgcctgaagcagcgggtactggacatcatcgacatattgttcagcgatacggtcaaagcacgttatatcgataaagaactcagtaatcgctacgttccccgcggcaatcgccgcaaagtacgggcgcagttggcgatttatgactacatcaaaagtctcgaacaacctgaataaccctatgccaatacacgataaatcccctcgtccgcaggagtttgctgcggtcgatcttggtagtaacagttttcacatggtcatagcccgtgtggtagatggtgccatgcagattattggccgcctgaaacagcgggtgcatctggcggacggcctggggccagataatatgttgagtgaagaggcaatgacgcgcggtttaaactgtctgagcctgtttgccgaacggctacaagggttttctcctgccagcgtctgtatagttggtacccatacgctgcgtcaggcgctgaacgccactgactttctgaaacgcgcggaaaaggtcattccctacccgattgaaattatttccggtaatgaagaagcccgtctgatttttatgggcgtggaacatacccaaccggaaaaaggtcgcaaactggttattgatattggcggcggatctacggaactggtgattggtgaaaatttcgaacctattctcgttgaaagccgccggatgggttgtgtcagctttgcccagctttattttcctggcggggtcatcaataaagagaattttcagcgcgctcgcatggcggcagcacaaaaactggaaactttaacctggcaattccgtattcagggctggaacgttgcaatgggcgcttccggtaccataaaagccgcccatgaagtgttaatggaaatgggcgagaaagacgggataattaccccggaacgtctggaaaaactggtaaaagaagttttacgtcaccgtaatttcgcaagcctgagtttaccgggtctttccgaagagcggaaaacagtcttcgttccgggactggcgattttatgcggtgtgtttgatgctttagccatccgtgaactgcgcctttctgacggggcgttacgcgaaggcgtactgtatgaaatggaaggacgtttccgtcatcaggatgtgcgtagtcgcaccgccagcagcctcgccaaccagtatcacatcgacagcgaacaggcccgacgggtgctggataccactatgcaaatgtacgaacagtggcgggaacagcaaccgaagctggcgcatccgcaactggaggcgctactgcgatgggccgccatgctgcatgaggtcgggttgaatatcaaccacagcggtttgcatcgccactccgcttatattctgcaaaacagtgacttgccgggttttaatcaggaacagcagctgatgatggcgacactggtgcgctatcaccgtaaagcgattaagctcgacgatctaccgcgctttaccttgtttaagaagaaacagttcctgccactgatacagctattgcgccttggcgtattactcaacaatcaacgtcaggcaaccaccacaccgccaacattgacgctgattactgatgacagtcactggacactgcgtttcccgcatgactggtttagtcagaatgcgctggtactgcttgatctggaaaaggagcaagaatactgggaaggcgtggctggctggcggttgaaaattgaagaagaaagtacaccagaaatcgccgcttaatactttgcgggccgacgagaaatgtcggcccgcattattcaggcactttcgcgaatgggttcgatttcattcagcgtatcaattaacggctgcggcttaccaataagataaccctgcatataatcgatccccaaagagagcaccgcctcgcggatctcttcgttttcaacgtactctgccactaccagcattttcttcattcgcgccaggtggcaaatgcttgccactatctgataatccagactattactcacaatattgcggataaaactgccgtcaattttaagcagatcggcattcacatttttaagccgcgcatagctggcgtagccggtgccgaaatcatcaatcgcaatctggcagcctaattcctgaagatgctgcaaggtgatttgcgcctgcttaacattggtcagagcattactttcggtgacttcaaaaataagttgccacgcttcaatctgatatttagccagcaactgactgacttcaacaggaaaacgagcctgacatacgctggttggagacagattaatagcaaaacggtgagcgggcatcttcgctctgttttcagccataaattgcagcgtatgctcaatgacccacatgtcgatactgctgcttaaaccaaattcgtgcgcgaccggcaagaagctatcggggctgatcagttcatcattctcacctttcatgcgcagaagaatttcatggtaaacatcaccacgcataccggtaatcggctgggccatcaggaaaaaatggttgtgttccagcgcctgctgtagtcgattcatcatcgcgactttatctttcaattcgcgttgcaaatacattgccccgcgacgctgcatattttccggggcgttggtcacgatggaaagttcggcgaccgtatttagctctcccagcagcaggtagatatgattcactgggctgcgcacatagcagtaactgacgccaatctgcggttgcatcggcatgccatcccaaaagaaacgaaattgcttgagatggctatccagtgcggtaatgcgctcctggtggctttctgtattcagtcgcagcgcgagatcgttaccgctaagctgataaacatcttcacccggttccagcaagggactcagccagtgagaaagtttttgcttgtattgaatccgcagcatgatgccatagttcttaaccagcatttccatgccagggatgcgtaaataacaaagcgcagaccagggggcatcacgcaacgcgcgattcagggcgcgaacatttggcagatgaaccaccgggtccacatacgcaagccgctgaatgcgtctgactaccgctctctgacgggttgccagtacagccatataattgacaataaaagagaataccagataactggaggaggttatggtcagctgcgtggtatagccaggataaatgggaatgtaattttgatagctgtggatgctgatcatcaacacgaccgcccagagcaggctaatcagcttataaccatagcgcatcgctccccacatcatcaggggcagcaataaactcaaggtataattggtgctaaaaattgtgcttttttcatttaacggcatgcataacagcaacaataaagcacctaatgccagtagccagagcgcgaactcttttttggtgactttggcatcaacctgctgttttaattggctataatagctacgtaaataaaatggatttcgcactacccgaatgatgaagtagcacagcgggacaccgatcagattacccaccagtaaggcctgataattgattaaagtcccgaggttaaaaggcatgacaccgaccagattttctctgctcgccagtaatcctacaaatgcagcaaactggaaaagtatcagaaacagcgttgcaggaaacacaatctgccagaatatacgctgggaaattaaacgggtatcaccatgactaacgttgttacgccggggagtaaagaccctgtaaccgccccaacagagaatgataatgataataaaattagccgttaaacttagcgtttcgtaaaaacccagctctgcatatttgcggacaaaaatccctaaggcgatccctggcaatgccgcccagctgaaaaacatcatcatgctgatcatcagtgccagaggcagataaaagagaaaaacctcaccggaagaaatatgcgcgaaagtattaatgtgggcgaaaatgggcaagattaaagaaggcaggaacagcggaagcccccaccatttatcacgtatttttatataagttgcattcagtttcatagatgctcagcagaatcccccacatcctgaaggaggtgtattcagacaggcatcccacctgacttcgaatgatgattattcatcactatagagagcattgattctaagtgtcatatgaaagtaccaattgatatatatcaaacaaaataaccctgattaatgaattattacgtttatcatgttaattcatcattattacatcatcattgtaaataattaaattaacttccataacattaaaatatgtatccactgacgcttttttacataacgaagaattgaccattttgtcctgttgtgccttaatgtaagtaccgtccacagcgtgggacatacttcaaggaaccttttgtgagtcaggcaaccagtatgcgaaaacgacaccgatttaacagtcgcatgacccgtatcgtactgctcatcagctttatcttcttctttggccgttttatctacagctccgtcggtgcctggcagcaccatcagagcaaaaaagaagctcagcaatccacactctccgtcgaaagtccggtacaacgttaacggttaccttctccactttcacagaacataacggcacttcgctgtcggatgcttttgctgtttgggattatcaaagcggcagatattctttcatcttaaattttacgtctttatcctgactgatgtttatcctgtttggctgcgaaataaatataaaattaatatatatgttgtaatgatatatttttataaattattccctgcgtgaattttaataaatttaatctatccctttatacgcaatacatttactttcctcttttgatgatcttaaatgtcttatttttcgtaatgtgtataacaaggaatagtgatgaaatttaaaaaatgtcttctgcctgtggcaatgttagcgagtttcactctggcaggatgccagagtaatgctgacgatcatgctgccgatgtttatcaaaccgatcaactgaataccaaacaagaaactaaaaccgttaatattatttccattcttcccgcaaaagttgccgtagacaactcccaaaataaacggaacgcacaagccttcggcgcgcttattggcgcagtcgctggcggtgttatcggccacaacgtcgggtctggcagcaattccggaacgacggcaggtgcagttggcggcggagctgtaggcgcggcagcgggttctatggtgaatgataaaaccttagtggaaggtgtttctttaacctataaggaaggcaccaaagtgtatacctctacccaggtgggtaaagagtgccagtttacgacaggtttagccgttgttattaccacgacgtataacgaaacgcgtattcagccaaataccaaatgtcctgaaaagagctaataatcaggaggagtcatgaagaaagtttttctttgcgccatcttagcctccttaagctatccggctatcgccagtagtttgcaggatcaactctctgctgtcgcagaagcggaacagcaaggtaaaaatgaagagcaaaggcagcatgacgaatgggtcgcggagcgcaacagggaaatccagcaagagaagcaacgtcgcgcaaatgcccaggccgccgctaacaaaagagcggcaacggcagcggcaaataagaaagctcgtcaggataaactggacgccgaagcctctgcggacaaaaaacgcgatcaaagttatgaagatgagctacgcagcttagagattcagaaacaaaaactggcgctggcgaaagaagaagcccgcgttaagcgagaaaacgaatttatcgatcaggaactgaagcacaaagctgcgcaaaccgatgtggtgcaatctgaagctgacgccaacagaaatatgactgaaggcggtcgcgatctgatgaaaagcgtgggcaaagcagaagagaacaaaagcgacagctggtttaattaatcgatgttagtaacttcaatcctataattcttgaagataaaaaaccctctgtagtaacagagggttttgttcattcatagtgcagggtcaaatcattcccactcaatggtagctggcggcttgccgctgatgtcatacaccacgcgggaaataccgttcacttcattgataatgcggttggaaacgcgaccgaggaaatcgtacggcagatgcgcccagtgtgcggtcataaagtcgatggtttcgacagcacgcagagagacaacccagtcatacttacgaccatcgcccattacgccaacggaacgtaccggcaggaacacagtgaacgcctggctgactttgtcgtacaggtccgctttacgcagttcttcaatgaagatggcgtcagcacggcgcagcaggtcacagtactctttcttcacttcacccagaacacgaacgccaaggcctggtcccgggaacgggtgacggtacagcatgtcgtacggcaggcccagctccagaccaatcttacgcacttcgtctttgaacagctctttcagcggttcaaccaggcccatcttcatctctttcggcaggccgcccacgttgtggtgagatttgatgacgtgtgctttaccggttgcagacgccgcagattcgataacgtcagggtagatggtgccctgcgccagccacttcacgtcttccagtttcagcgcttcttcatcgaatacttcaacgaaaacgcgaccgatgattttacgttttgcttccggatcgttttcgccagccagcgcactcaggaagcgatcttctgccggtacgtgaacaatgttaagaccaaagtgatcgccaaacatatccagaacctgctctgcttcgttgaggcgcagcaggccgttgtcgacgaatacgcaagtcaggtttttaccgatagcgcggtgcagcagcattgcggttacggaggaatccacaccaccagagaggccgaggatgactttatcgtcgcctacctgctcgcggatgcgagctacagcatcgtcgataattttcgctggcgtccacagggcttcacactggcagatatcacgcacaaaacgctccagcatgcgcataccctggcgggtatgagtcacttccgggtggaactgtacgccatagaagcgtttttcttcgttagccataatggcaaacgggcagctttcggtgctggctacggtgatgaagtcggacggaatagcggtaactttatcgccgtggctcatccagacatcgagcagcggtttaccgtctgcggtcagcgcatcttcgataccgcgaaccagtgcgctgtcgtttacgacttcaacctgcgcgtagccaaattcacgttcgttagaggcttcaacgtgaccgcccaactgcattgccatggtctgcatgccatagcaaacgccgaataccggtacgcctgcttcaaagacatactgcggcgcacgcggactgttttcttcagtagtactttccgggccgccggaaagaataatgccgcttggattgaagtcacgaatttgtgcttctgtcacatcccacgcccacagttcgcagtaaacacccagctcacgcacgcggcgcgcaaccagttgagtgtactgagaaccgaagtccagaatgaggatgcgatgcttatgaatgttttccgtcattgacgcttattccgaggcaagtgaaacagataatataaatcgcccgacatgaagtcgggcgaagagaatcaggagcccagacggtagttcggggactctttagtaatggtcacgtcgtgaacgtggctttcctgaatgcccgcaccgctgatacgtacaaactccgctttagtacgcagttcgtcgatagtaccacagccggtcagacccatacaggagcgcaggccgcccatctgctggtgaatgatctctttcaggcgacctttataggctacgcgaccttcgataccttccggcaccagtttgtcggcagcgttatcgctctggaaataacggtcagaggaacctttggacatcgcgcccagggaacccataccacggtaagatttgtaagaacggccctggtagagttcgatttcacccggagattcttcagtacccgccagcatggaacctaccatcaccgcgcttgcgccagcggcgatagctttggcgatgtcgccggagaagcgaataccgccatcagcgataaccggaataccggtgccttccagggcttctactgcgtcagcaacagcggtaatctgcggaacaccgacgccagtcacgatacgagttgtacagatagagccagggccaatgccgactttaaccgcactgcaaccagcttctgccagagcgcgtgcacctgcagctgttgccacgttgccgccgataatttgcagatccggatatttagcacgggtttcacggatacgttgcagtacaccttcactgtgaccgtgggaggagtcgatcagcagaacgtcaacgcctgcggcaaccagcgcgtcaacacgctcttcgttacccgcacctgcgccaaccgctgcaccaacacgcagacggccttgctcgtctttacaggcgttcggtttacgttccgctttctggaagtctttcacggtgatcatgccgatcaggtggaattcgtcatcaaccaccagcgctttttcaacgcgtttttcgtgcatttttgccagcaccacttcacgggcttcaccttcacgcacggtgaccagacgctctttcggcgtcatgtaaacgctaaccggctggttcaggtcggtaacaaaacgcacgtcacgaccggtgataatacccaccagttcgttttcttcggtaacgaccggatagcccgcaaaaccgttacgctcggtcagttctttcacttcgcgcagcgtcgtggttggcagaacagtctgcggatcagtcaccacaccagattcgtgttttttcacacggcgaacttcttctgcctggcgttcaatggacatgtttttgtggataaagccgataccgccttcctgagccagagcaatagccaggcgcgcttccgttacggtatccattgctgcggaaagcatagggatattcagacgaatagttttcgtcagctgggtgctgaggtcagcagtattcggcagaacggtagagtgagcaggaacgaggagaacgtcgtcaaacgtcagagcttctttagcgatacgtagcatgggcaatatctcgaccagagtggttaataaatattgccgcggcattatacagagcgtaaccgattgcatctacccctttttgcaaaaaatgcttgctatccccgaagggcgggttactatcgactgaataacctgctgatttagaatttgatctcgctcacatgttaccttctcaatcccctgcaatttttaccgttagtcgcctgaatcaaacggttcgtctgctgcttgagcatgagatgggacaggtttggatcagcggcgaaatttctaatttcacgcaaccagcttccggtcactggtactttacactcaaagacgacaccgcccaggtacgctgcgcgatgttccgcaacagcaaccgccgggtgaccttccgcccacagcatgggcaacaagttttagttcgcgccaatattacgctctacgagccgcgcggcgactaccagataatcgttgagagtatgcagccggccggtgaagggctgctgcaacagaagtacgaacagctcaaagcgaagttgcaggctgaaggtttgttcgatcagcaatacaaaaaaccacttccctcccctgcgcattgcgttggtgtgatcaccagtaaaaccggtgctgcgctacatgatattttgcatgtgttaaaacgtcgcgatccttctctgccggtgatcatctaccctgccgccgttcagggcgatgacgcgccggggcaaattgttcgcgccattgaactggcgaatcagcgcaatgagtgcgacgtattgatcgtcgggcgcggcggcggtagcctggaagatttatggagttttaacgacgaacgcgtagcgcgggcgatttttaccagccgcattccggttgtcagcgccgtcgggcatgagacggatgtgaccattgccgattttgttgccgatctgcgtgcgccaacgccgtctgccgccgctgaagtagtgagccgtaatcagcaagagttactgcgccaggtgcaaagcacccgtcaacggctggagatggcgatggattattatctcgccaaccgcacacgtcgctttacgcaaattcatcaccgattacagcaacagcatccgcagctccggctggcacgccagcaaaccatgcttgagcgcctgcaaaagcgaatgagctttgcgctggaaaatcaacttaagcgtaccgggcaacagcagcagcggttaacacagcggctgaatcagcaaaatccacagccgaagattcatcgcgcgcaaacgcgcattcagcaactggaatatcgtttagcagaaaccctgcgcgcacagcttagcgccacgcgtgaacgtttcggtaatgcagtaacgcacctcgaagccgtaagcccactgagtacgctggcgcgtggatacagcgttactactgctactgacggcaatgtactgaaaaaagtgaagcaagttaaagcgggtgaaatgctaaccacacgtctggaagacggctggatagaaagtgaagtaaaaaacatccagccagtaaaaaaaagccgtaaaaaggtgcattaagccagcacgaattcaacgcgttttttgcttatcaagccatgcccgtgctgacagaagtaatctactgcaccacaggcttttaacacctgcaacggttgatggcagtctggacaaagagctttcatttcaataaattccccgcaggatcggcaacgcgcatggccgttatcctgatcaagcacatgctgacattgtggacaatgcagttccatatgaattcctccggtagccattccctctacattcatagagggaatggcagataaaatacttacggataattatttatttttcttgatgtgcttcatcagacgcttacgtttacgcatctgggttggcgtcagggtgttacgcttattcgcatacgggttttccccttctttgaactgaatacgaatcgggcttcccattacgtccaggcttttgcggaagtagttcatcaagtagcgcttgtaggaatcaggcaggtctttcacctgattaccgtgaatcaccacaatcggcgggttataaccaccggcgtgggcatatttcagcttcacacgacgaccgcgtaccagcggcggttggtgatcttcaacagccatcgtcatgatgcgcgtcagcatagaggtccccacacgacgggtggagctgtcatacgcttcacgtacactttcaaacaagttaccaacaccactgccgtgcaaggcagagataaagtgcacacgagcaaaatcgataaagcccagacggaagtccagcgtttctttcacctgctctttcacttcctgactcaggccatcccacttattcaccacaatgacaagactgcgcccactattgagaataaagcccagcaggctgagatcctgatcggaaataccttcgcgcgcatcaatcactaacatcaccacgttggcgtcttcaatggcctgcaacgttttgattacggagaatttctctacagcatcggtgattttgccgcgtttacgtacgccagcggtgtcaatgagcacatactcacgtccatcgcgttccattgggatgtagatgctgtcacgcgtcgtgccaggcatgtcgtaaacaacaacgcgctcttcaccaagaatacggttagtgagtgtagacttacctacgttcggacgacccacaatcgccagtttgatcggcagactttgcgggtcgaagtcgtcttcctcttcttcttcgccgttctcttccgcttcaaattgcgcccagtattcagcgtcttcgtcgacttcctcttgcggtgcgagatcttccatccacggcagcagcacatgctccagcagacttaatacgccacgaccgtgagacgcggcgatcgggtagatttcacctaaaccaaggctgtagaaatcaaccactgcctgatcgggatccagaccgtcagttttgtttgccaccaggaaggtcggtttttcacgggagcgcagatgtttggcaatcgcttcatctgccggcatcaggcccgcgcgcgcatccaccataaacagtacgacgtccgcttcttcaatcgccagcaggctctgttccgccatgcgggtttctacaccgtcttctgtgccatcaatcccgccggtatcaatacagataaactcacggccttcaatttccgcacgaccgtacttacggtcacgagtcagacccgggaaatccgcaaccagcgcatctcgggtgcgagttagacggttaaataacgtggattttcctacgttagggcgcccgacaagcgcgaccacaggtaccatgtttaaagcctcatttttataaatcatcagacaacgcacgctatattcgcgtcgttgttaaaaacaggaaaacggcccctgtccaggagccgttttcaaagtgaacgacagagacgattaacgtgtaatagagtacacggttccgtcttttgcctggatcagcagtttgccgtcagcggcaaccggttcagtctggaaaccggaactatcaactttttgctgggcaacgaaacgaccatcttcgacgttaatccagtgcagataaccttcactgtcaccgaccaccaggttgccattatacagcaccggagaagtcagcaggcgatgcagcagatcgctttgtgtccacagcgtaacgccgccatcaatggtcaacgccatcacccggtcattttgatcgaccagatagatgcgattgccgtcgacgatgaaatcattcacgctacccagttcgcgtttccacataatctgaccactgcgcagatcaagcgccgtcaggttaccattataggccagcgcgaaaacaacgccgttaacaacgacgggagtcgtgtcaacatcgctcagacggtcaatttcggtagaaccggtcgcctgggaaatacgctgctgccaaatcatctggccctgttccatcagcactgcgctgacgcgaccattatcgccccccacgacggccgcaccaaaagccgttgtcggcgcagactcgccacgcaaagagaggctaggcatatcgaggttaactgtccatttgacagcgccgtcagcttcgttcagcgcttgtaactgaccgttactggtgtggattaacaccagaccgtcgctgaccaccgggcggctaagtgcttcacccgcgactttagtttgccatgccacagtaccatcgctggtattcagcgcgtaaacctgcgccttttcgctgccaatgtagacatgcccaccagacacggtcacaccgccagaaagtaatgcaggctctttagagaaccagccatctttctcggccaggctgacagaccagatttctttgccatcatccgcattcagcgcttttactaaaccagcgcggtccgctgcatagacaacgttgtccgccagtgccggatgaagattggaatagaagttgccaatgccgctaccaacggaagtgctccacgccgtggtcggcgtaaactggttttcaacggttggcaatggggacatctttaccacatcttcttcgctgttaaacaggctacagccgcttaaaagggtaacggaaagcagtcctggcagcagtaatttacgcaattgcatcgggtccctctcagatggacaaattattaattttcatctgcatcatttcgctcagtgccggagtaacatcgcttttcacgcctgcttcccatgcactacgcgcaccttgcttatcacctttgctcagcaatgcttcaccacgcaggtcggcaacaatggcagcccacccttcacctttgatggtatcaagggttttcagcgcggcatcagcctgcttgagctgtacctgaacgcgagcaagacgcagatttatcacggctttgagattttcatcgctcgtgtctgccagcccctgttgtaactgggcggcagctttctctagttcatttttgtcaacaaattgctgcgcaagttccaaagaagccagcgcaccataagtatttttattttcagcagcaaatttttccgccgccgggatgctatccggtttgccttcgctcactgcggtaaccgcattttgataggcaagagaagcggagcgtgcagaatcaacctgatggctgttccagtagcgccagccaatcagtgcgccaacgcccaaaatcaccccaacagccagtgctttgccattttcagcaaaaaagcgtttaaccgcttctacctggtcgttttcgttctcgtaaatttccacgctgtccttctccttccttaacccagtaacgtgcgcaaatgcgcggctacgctatcctgcgcaactgccgtttgctcaccagagcgcaaatccttcactactgctgtgccgttagccacttcagactcacccagcaccacagcaacgcgggcaccccatttatcagcacgggcaaactgtttcttaaagttgccgccgccgtggttggtcatcaatttcacgcccggtaattcatcacgcagacgctcagctaatgccatagccgcagattgtgtatcagcaccactagccaccaggtatatatcgacaacaggatcggctttaaattccggattaacggcctgtactaacaatacaagacgttcgaggcccatagcaaaaccgacagccggtgttgcacgaccgcccagttgttccacaagaccgtcataacgaccgcctgcacacacggtgccctgggagccgagactgttagtcacccactcgaaaacggtacggttgtagtaatccagaccacgcaccagacgctggtttacggtgtaagcgatccccgcgctctccagcagtttgcacagaccggcaaaatgctcacgagattcctcgtccagatagtcacctaatgccggagcgtcgttgagaagcgcctgcacttccggatttttactatccagcacgcgcagcgggttagtgtacatgcggcgtttgcagtcttcgtccagcttttctttatgctgctcaaggaatgccaccagcgcatcgcggtaattggcgcgtgcttccaggctaccgatagagttcagctcaagagttacgtgctcggaaatacccagcgcgcgccaccagcgggcagtgagcataatcagttcagcgtcgatatccggaccttgcagaccgaaaacttcgcagcccaactgatggaactgacgataacgccctttctgcggacgctcgtgacggaacatcggcccgatataccacagacgctgttcctgattgtacagaagaccatgctcgatgccggcgcgtacacagcccgccgtcccttcagggcgcagagtcaggctgtcgccattgcgatcctcaaaggtgtacatctctttttcaaccacgtcggtgacttcaccaatcgcacgtttgaatagcggggtctgctctacaatcggcaagcggatttcactgtaaccgtagctgccgagcacgtttttcagtgtgccttcaatgcgctgccagatggccgtttcgccaggcaggtaatcgttcatgccgcgaatggcttgaatgttttttgccacgtttattctctttctgaatataaaaatgaaccctcaacgcttccctcaatgtttcgggagccatgcgggttcaatcatacacgggaagcgaggcgcttcccatcacgttattatttttcaacctgctgaacgtcaattcgacgcgcttcgtccagctgactggctttcgcacgaatgcgtgcttccagctggtcgatcatatcgttgttgtccagacggtctttgcgcacgccatcttcatagaggccgcttttcttgttgccgccggtgacgccgagtgtagaaaccagcgcctcacctgggccattcaccacgcagccgataatgctaacgtccatcggagtgatgatatcttccaggcgttgctccagcgcgttaaccgtaccgataacatcaaattcctgacggctacaggtcgggcaggcgatgaagttgatccctcggctacggatacgcaggcttttcaaaatatcgaaaccgactttgatctcttcgaccggatcggccgccaggcttacgcgcagcgtgtcgccgatgccttcagacagcagcagacctaaaccaatggcggattttactgccccgctgcgcgcaccaccggcttcggtgatccccagatgcaacggctgatcgatctgttttgccagcaaacgataagactcaacagcgaggaagacgtcagacgctttcacgctgactttgaactgatcgaagttcaggcgatcgagatgatcaacatgacgcatggcagattccagcaacgcctgcggcgtcggttcgccatacttttcttgcagatctttttccaggcttccggcgttaacgccaatacggatcggaatgtttttatcgcgcgcacagtcaaccaccatgcgaatacgctcttcattaccgatattgccagggttaatacgcagacaatcgacgccgtattccgctactttcagcgcaatgcgatagtcgaagtggatgtcagccaccagcggcacgttaacctgctgtttgatgagtttgaacgcttctgccgcgtccatcgtcggtacggatacacggacgatatcagcgccaacgcgttccagcgccttgatttgattgaccgttgcttcgacgtctgtcgtacgcgtattggtcatggactgtacggcgatgggagcaccatcgccaatcggcacattcccaacgtaaatacgtgtactttttctacgttgaattggagcctggttatgcatgaaaaatctcccgcgttacccgtctgttactgcgccggactttgttcggcattgagggtcagacgcgcaacctggttagttctgataaaacgactcagatcgacaggtttcccttgatactggatctgtactgcggctggcgcaccaattttcagtttgtacggtgcctggccggttaagttcaaattaccgtctttacgctgcataccgctaaacaattttttaccggtagcatcagtgacctccagccagcaatcggcagtaaagttcatcaccagcgcattcggatcagccaccggcgtggtcacgccagcctgatcggttggcaacggcgcagcaccatctggcgttgttgctgccgttggtgccggggtcgcggcggtatcaacatttgcctggctagggctaacaaccgcattctgttgcggatcaacagctggtgctggcgcagttacggcaggtgtttgcgtgttggttgcggtagtatccacagacgctggcggcgtggacgttgtagccgggtctgtagttgtgctcgtatttaatggaacactctgcccctgctcgctattactgctcagttccgcgctagattgatcggccatagtggtgatctcttcctgctgagctttgcggtcttgccaccaccaggcaccgctcaggccgataaccacaaacaacaccagccaagtgaaggtcatcagccagccgtcgcgttttttgcggcgtttaccgagggaaaaactctgcatcggcgcaacttttgcagcccgaagtggagcctgcttttccagccctggcagcagttcttcttctggaatatgtaccagacgcgcataagagcggatatatccgcgcaggaatgtactagcaagatcggcgggtgccttatcttcttcaatgtcgcgtaccgtggaaaccttcaggcaaagtcgctcggcaacggcctgctgactaagtcctagttgttcgcgagcattacgcaggcgagcgccggtagtaagtgcttcattttggtcgtgcgtggcttcagtattcattcgctgcaggtacgtttaaatgagaattgagatgccggtgaaccatcatgctcacccacaccgcgaaacatccgttaagttaaccgttatcatacagtataagaccgtctgtgtgctcgtgacaaagcccacattcactaaggctaacttactgttgcatcgttacatactgccttaaagtcagcaaaaacgcaccgttaatattgaccagacaattgcaacttaatacttcattcataaaacattacgccacggtacataaagtaaccgtggcgtaatggctatcagaccgctttaatgtcgatggcttcaccctgcatccgtttacgcagggtacgtttcgtacggtcgataacatcgcccgccaactgaccacaggcagcatcgatatcatcaccacgagttttacgcacaatagtggtgaaaccgtagctcatcagcactttactgaaacggtcgatacggctgttgctgctgcgtccatacggcgcacccgggaacgggttccacgggatcaggttgatcttacacggcgtatctttcagcagttccgccagttggtgcgcgtgttcagtgccgtcgttaacgtggtcaagcatcacgtattcaatagtgactcggccctgattggcgttggatttctccagataacggcgcaccgcagcaaggaacgtttcgatattgtactttttgttgatcggcacaatttcgtcacgaatttcgtcgttcggcgcgtgcagggaaattgccagtgcaacgtcgatcatatcgcccagtttatccagcgccggaactacaccggaagtggaaagcgtgacgcgacgtttagacaggccaaaaccgaaatcatcaagcatgatttccatcgccggaacgacgttgttcaggttgagcagcggctcgcccatgcccatcatcactacgttagtgatcggacgctgaccggtgacttttgctgcgccgacgattttcgccgcacgccacacctggccgataatttcgctcacccgcaggttgcggttaaagccctgctgggcggtggaacagaatttacactccagcgcacaccccacctggctagagacgcagagcgtggcacggtcgtcttccgggatatacaccgtttcgacgcgctgatcgccaacggcgatcgcccatttaatggtgccgtcagaactacgctgttcttcaaccacttccggtgcgcggatttccgccacctctttcagtttgccgcgcaacactttgttgatgtcggtcatctcatcaaagttgtcgcagcaatagtgatacatccacttcatcacctgatcggcgcggaagggtttttcacctaaatctttaaaaaactcccgcatctgctgacggttgagatccagcaggttgatttttccatctttcgtggtgacgttttcaggtgtgactaattgttcagacatatgctattccggcctcgttattacacgttatggcccctggagggttgaaaaaagaaacgccccggtgagcggctgctcgtccgggggcgctgcattgtacaaattctggcgcacggatgccacgtttgcacgcggcatttacgaaattattaacgggtgcgcgggcacacttcgccttcgccaaagaaataagcgatttcgcgagcggcagattcgacggaatcagaaccgtgggtaccgttttcggtcaggctgtcagcgtaatcagcgcgcagagtaccagccagtgcgtttgccggattggtcgcgcccagcagatcgcggtgacgctgaacggcgttttcaccttccagcacggaaaccacgatcgggccagaggtcatgaattcaaccagaccatcaaagaacggttttccatcgtgttcagcataaaagccacgtgcctgttcaacggtcaggtgcagcattttggtgccaacaattttgaaccctgcagcttcaaagcgcgcaaagatattaccaatgacgttttttgctaccgcgttcggtttgatgatggaaaaagtacgttcaatagccatttttacctctgtaaattgttctgttgttgtctgtaccagcgtacgagatggcgcggattataatgagcaacagggccgttgactattgatgaaggtaacatttttttaaaataaaatgagttttagcaacaatcagggacaaaacagattattgcatgacaaatttcactgtcgcgatttgccccacgtcatccatcaccagcaattgataatcacctttatccgtcaaatgcagggtcacgttgcgcccgcgttcagttaacggttcgccattcagaaaccaccagcgttcacctgcccctccactactttgcaacggcaaagtcgcttccgctgcgcccggtaaacgtttaataatcgcgccatcgcgaacgcctgtcagctgcagcgggagctgggcatcgtgaccgtatggcgggcaacttgtgctggccggtggtaagcgcacagcgcgacgttcacttgcgggcagccagggttccagcggtagcggccagacatttatcatttcttgtcgcgcttgcgggcaatcagcggcaacacgtttgccattttcatccagccagatggggaaacgaatgccattaatgccttcctgctccggcagtaatagagttggcggctgactcccgtccagcagccaggttgccaggcggcggcgacagttaccgtcaccttccggcaaagactgtccgcccggccagcagataacgccacgagtgacactgttcgggcgcgggtcttccggcagattcgcactgcggctcagtaagatattattgacctgattcaacaatggtacggcactggcaaagccaaactgaccaacaacgggcgtgccgtccggtctgccagtccagatcccaatgacatagcgagcgttaaccccaatcgcccaggcgtcacgatagccatagctggtgcccgttttccatgccagtggggcgacgcgcggcaaggcactatccggcaagggttgcgcttcatcagccataatccggcgaatgatccacgccgccccgctgctcattaaaggccgttcaagcagcggatcgtcaggctgtaagcgcaatttgcctgccttgccgtggcgagcaaacgcggtatacgctgccgccatatcttccagttttgcaccagcgccgccgagaatgagactaagattcggcgcagcaccgttgggcaaatataacggcaatccaacattgcgtaactttgccgcaaaccgtttcggtccataggcttccagcacctgcacagcaggtaagttcaggctgcgcaccagcgcctcgctcatgctgatcgggccatgaaaaccgctatcaaagttacctggtcgataatcaccggtgcgccgggggacgtcttgcagcagacttgccgggtggatcaagccttcatccagcgccagaccataaacaaacggtttgagcacacttcctgggcttcggatgctattgaccatatcaacatgaccaaagcgactatcatcgttgagatcaacgcttcccacccagccgcgaacacgcatatcggtatgatcaaccacgatcatcgccagactgctgcgcggtggcaaccgccctttccagttttgcgccagttcttccagacgtcgttgaagaccggcatccaacgtagtagtgattttgtcgcttttgcttttaccgagcatcatgcggctaaacagcggtgccagttgcggcatttgtcggggggccagccagatgggttcttccctactctcttttacctgctcacgggaccacacaccttgcacggccatccgttcgagcactttattacgcgcggcttcggcacgctccggccaacgatccgggcgaagacggctgggcgcttgcggcaaaaccgccagcattgccgcctcggaatagcttaaattcgcagggctttttccgagataagcccaacttgccgcaccgatcccctgcaacgtaccgccaaacggagcgcggttaagatacaaggtcagaatttcacgcttagacagatgccattccagttgcaacgcgcgccagagctggcgaattttgccgccaaatgttttggggtgaggatcaagcagacgagcaacctgcatagtgagcgtgctgccaccggaaataacccgtccgctagtgagatcttgccatgctgcgcgcgccacgctgaatggattcacccccggatgcttccagaaccagcgatcttcataattgatcagcgcttcaaggtaacgtggagaaacatcttcgattgttaccggataacgccagatgccgtcagcatcggcgaagcgccagagcggcgtaccatcctgcgccacgaccactcgtgcgggattgacttcatgcagcggtagaggccagagtttatctgctccccacgctgcaagaaaaaggagaaagggcgcggctgccaacgttatccagcagccgcgtttggttaacaagcgaggcatttacggtctgacaatcagcagatcttcagccgcgccggtcgcccgccattggggaacatacatactttccaccatcggttgcggtacctgatacgttcccggcgtcaccgcccgcgccagatacaccagcgttaccggttggtattcatcaacggcaaccgccgccacaaagcgatcgtcacggaactcaatgtgcttaatgctcgcctgctgcatctggttcagtaagttctgcacttcgccaccactttgctccaggctggcgctaccgttcgccagattctggttttccagttccagacccgcaggcagcagatccacgactaacgcatccggcacgctgttactggcttttacctgcaaccacaccagcaccagatcgccgctacgtaagctgtccaggcttttgctcttaccatcagtaccaagaatatgacgctcgatttgcagcacattgttcgccggtaaaggtgcggattgcggataaccgctggcatccatacgcaaccataacggctgatcgccactgttgctcacctgcaaggtgacaagttgatcgctattcagattgctgttttgcgctttctcgcctgtcagctgctcagcactgaaagaggtttgcgcctgccatttaccgggtaaatcctgaatcgtacgggcagccaggaacaacgcgttactttcctgcgtgcttagccagcgttcaccaaacgcctgctggctaagtgtgttcagcaaagtgtactgctcatcgggtagcagtttattttcttccagcaaggagagcattaacgcgttgtcgcgcagactactaccgtaatcacccagccatatccgctcatcactattacgcggcgttttcagcgccagcgcaatcgcttcttcaccacgcgtcgcatcacccatggttttcagcgcaacgccaagttgcagcagcggtaaaccagaagcggcatctgcacgatgctcccagatttcacgcagcgcacccagcggagccttttgctgacgggccaacaccagcgcagcgtaagactgtacggcgaatttactggctttgagattatccgcgtacgggatgctcatcatgcccggatcttgtaaatagcgcagcagacgctcattaccccggttaatggcgtctgtcggcacgctgtaaccctgttcgcctgcgcggaccaggaaatccatcacgtaagccgtcagccagtactcttcgtcaccgtttttatcccacagcgcaaagccgccgttatcacgttgcatttgcagcaaacgggaaatgccgatatcgacgcttgcacggcgtttctcatcactgtcgcctttgatgcccaacgcctgcagttgggctgcgttggtataaagactcggaaacaggccgctggcggtttgctcaagacagccgtacggatacgcttttaactctttgatataacgtgcgatgttcagcggtggtttgccgctcaacaacaattgcccttccagcgtaacagggctgaagttttgcaatccatccgccggaatcgcccatgtctcaccaggctgtaacgccgtaccgtaattaaccgtttgtgccgggaacgccggacggacgccgattttccactgcttatgctgatcggcaacggtttcacccggtaacgctaacccgctaatggtggcctgaatttctccatcgccataacccggcaatgctcgcaccgggataaacagcgtagtacgcacacctggcgctaattcaacggctgcgggactatcgctgaccagttcaagcaaaccactggcggtcagggcaacgttcagtttttgcggtttatcggtaagattagtgatatccagcgtcagacggctggtatcgccactcgccataaagcgcggcatgttcagttcagcaatcaccggtgcggcaactatcactttactttcgttgctaccgaagtcatctgccgtccaggcttgcgccatgacgcgcaattcaccgttaaaatcgccaatcggcagtgtaacgctgccttcgccctgttcgttgagcgttaccggcagcgcctgctgcacgacaatattgacgtgattgaccggcggtttaccaccacgtttcagctcatcaccatcgccaccgaaacgcagagctgccagacgcccctgaccttcaataacctgaccgtaaatatcgtaaatgtctgcgccatagcgtttctgaccaaagaacgcctgccacggatctggcgtgacgtagtcagtaatattcagcacaccactatcaacggcagacaccagcacattcacctgtttaggcttctcgccatttttagtgctggctttaattttcacggttaatggttgattgggacgcatttttgctggtgtttccagcgccagatcgaggcgacggttttcatcgccaagcggcagatgcaacacaccaaccgcgcgttttggcgtcgcggagcgagatttatcgccaggacgtaccaccagcgtacttaaatacagatcatgacgattccaggttttatcgaccggaatcgtcagatccagcccttgagcccgaacatcaatctcttgccaccacagcggcccttcactggactcgaccatcgcataacctttacccgccgttggcgcggcgatatgcaacttaatggtgtcgccagggcgataactggctttatccagtttcagcgtgacacggtcgggtcgcactgcgccgctaccgtcgctgttgtcctgccagctatagccagcccagaaacgaacactactgaccgcttcattcggcgctttgacttccagacgataagcgccccactctaccggaaaactgaccttgccggtttcgtccgctttcagatccagagtttgttcattttcgatcagatctttttgatcaaactgactctgccagccttcatcttcactccagttccagtagtaatcgcggcgttcgcgaatcaggcgcacctgcaagccgctcacggcttttttcacgccttgcgcatcgctataaacgatgtcaaaagcggcgttactgccttcatcaacaatgggctgtttcaccgtgctgtcagtacgataatcgtaaacgcttttgctggcgaactgcggacggatccccggcaatgcatcggcaggccagatagcctgctcagcgcggcgcgtcaccgggcgaccgccgctttccagcaaactaccctggaaaataacctgtaatggggaatgcgtttccttccactggctttctgtagaaacttcgccgcgccctttatcatccagcgtcaactgaacttcatccagcgtgcgggaaagattttcggcagctatatcgccgaattcaaaaccaggtaaggcactcacagcttcacgcagtgggcgcaggaaaagttgcccttgcaaagtattaccattagcaggtgcaccatacaggtagtaccccaccacggagaatttcacttcatctttcggcgttagcggggttttctcaccggtcagattcagcgccatgcgctctggcataaaatcttcgacgtggaaatcccacatccgatactgattatcgcccgtgttagcgcgaatatgccacataccggttgccgcattgctatcgagtggccaggtaaagtggtagaggccattctccggctgactaacgacgctcctgagtacctgcccatcgggtttaatcacgtctaacttgatgggttgattgggcaacgctttaccgtctgcatcacgcagcaaaccattgaggattaccgtttcacctgggcgataaagatcgcgtgggccaaacatgaaaaactgtttgctatagcctggcgcgccagcaatgttaaattctgctaagtccagcgccggaagttttaaatcgagtagcgttgtctgaccgtctttacgcgccaacagtaatgccgcgtttttatcattttccagctgcacatgcccctgagcgtcactggttgcctgagtcagagtctgccctttctcatttaataaagagacttcaattccttgctgggccgcgccgttttccagactttgggtaaagatatccagacgattgtgataacggtgagcactaacgccgatatcacttaacgtaaacagcgtcgcgggattactgtaatcgtaacgtccagcctgattcatcacagccagatacacgcccgcctgctgaagcggtttgatatcgcccagcggcagcaataatttttcacgggtgttacgcgcaggattgagatcaaaccgtccggtgtagaccagatccgccatctgcagcagtttgtcactctgccagttcgccaggctattgcggtattcccattggctaatgaatgctggcagagattctggcttaacgcggaagaagttaacatcgacattattaacgttgagcgccattaccggcagcccttcaacgactttgccaggcagcaggctaccacggctggcaaaaccgacgctgggttggatgtcgcgggtagttatagttttttcgtaatctttactgaaggttgcgttgttgagtgctttgacctccttgccaatagtaacgatcaaatcacgtttcggttcgaggtggcgtaaacgtaactctttaagattatcactcagctcccaggcaccatccactttgccgctttttttatcgacgacatgaataacgcgactgaaatcctgatccgggtcgagagggatggagaacgtcagcaccagcgtggctgcaccatcaagttggacttcagagagatccagcaatgtcagcaccttaccggcactctgttgggccagtttttgtctctccggcacggagagttttgcactactcgcgttttcactagaggccgctttagtaacttcagaaggcgcatcttttttcaccgctgttggcgcgttatcgttgttgtcgcaccctgccagcgccagcattagcatgcaggcggctacgcgtaactttttcatttttcatccctgccacaatggcccgttagcaacgtcgaataattattatgcgtgagaatttacgttatgtaattcagtatcacgcccatacaatccgaattttagtgagaattgtggctcagacagccaaatcagcctcttttgcttgtcgcttttcactaaacatccgacaatttagcctaaccccggcaaaaatggagatgcctatgtccacgacatggtttgtaggagccgactggctcgccgaacatattgatgacccggaaattcagattatcgatgcccgcatggcgagccctggacaggaggatcgtaacgttgctcaggagtatctgaatggacatattcccggcgcagtgttttttgatatcgaagcgctttctgatcacacttccccgcttccgcacatgctgccgcgcccggaaacgttcgccgtggcgatgcgtgaattaggcgttaaccaggataagcacctgattgtctatgacgaaggtaatcttttcagtgccccacgagcatggtggatgctgcgcacctttggtgtagagaaagtgagcattctggggggtggacttgcaggctggcagcgcgatgatctgctgttagaagaaggtgcagtagagctgccggaaggagagtttaacgccgcgtttaatcctgaagccgtggtgaaagtaaccgatgtattattggcaagccatgaaaatacggcgcaaattattgatgcccgcccggctgcacgttttaacgcagaagttgatgaacctcgcccaggtttacgtcgcggacatattcccggagcactgaatgttccgtggacggaactggtgcgcgaaggcgaactaaaaacgaccgatgaactggatgcgatattttttggtcgcggcgtcagctacgacaaaccaattatcgtcagctgcggctctggtgtaacggcagccgtggttttgttagcactcgcgacgctggatgtgccaaacgtgaaactgtacgacggcgcatggagtgaatggggcgcgcgggcagatttaccggttgagccagtgaaataagtattttacaggcaataaaaaaccgccgaatttggcggttttttattgctagtctggttcgcggcctttccagcaggttgacttgtgttacatgagcaacgcaggtgcttcacagcaaaacaatactcaccagtaactctctttttgtcaagcaaaagagagtaattattgtttatttagcgtattatcgacaccggccctttccgccgtgttcggtaataaaataacctggcttattagtccgaattcagacaaatataaataaatcctgctcaaaattaaaaattctaaccggtaaaagatattacttaaacatgtaaattcactttcctttaaaaaacaaaaaaccgccaaaatcaggcggttttttgttgctggtccggttcgcggcctttccagcaggttgtattaccgtagtaatgcaagcgcgtctcagcggagacaatactcgccagtaactctctttttgtcaagcaaaagagagttattattgttctgttagtgtattatccactgcggccctttccgccgtctcgcaaacgggcgctggctttaggaaaggatgttccgtggccgtaaatgcaggtgtttcacagcgcttgctatcgcggcaatatcgccagtggtgctgtcgtgatgcggtcttcgcatggaccgcacaatgaagatacggtgcttttgtatcgtacttattgtttctggtgcgctgttaaccgaggtaaataataaccggagtctctccggcgacaatttactggtggttaacaaccttcagagcagcaagtaagcccgaatgccgccctttgggcggcatattttagattatccgattctgtttaaagtcacgcaaaaaaccaccccagcgacgttcatagaatggcgcaatatgttcggtaataaagtggctaattcctttttccccttttttcacctgacaaatatcgattggttcatcgccaggtaatgtatcggtcgctacacttcccgtcgcctgaataatttcttcgatatcaccatcggcttcaatgccaataagtaaattaggctgtgcctcttcgttctctttaatactacaaataaaagcacgcttcaccggcttaatggttttaaataaggtggtgagactatcaatcatttgtgctggcggctctgcgacttcgcttaatatcaggctttcaccgccttccaggatttcctggctgctcagcggatttccctcttcaccaatcaacaaactgatttcacgcggcataaattctttaccggttggcagtttggcattaaggaagagcgtttcgccaagtgtcatctcaaacagcgtgcgaacgggcattacgacaaatgcctgttcgtcttcaaccgcctgttgaagtgcttctaagctggtgaaaaaaggaatgacgctggtgccgtcttctttttcccagtgctgtaaatcaagcgcgctatcttcaaccacagcctcgccctgcgccgccgtaccaggcacccagacggtggattccagtagagtacggaaaaaggccgggcggtgcgccggttcagttgctgctttttccagcaggtcttcaagttcgttttttgtttcggacataagaaccacaattcattcaacgttcggggcgcaaatgcctgatgcgctacgcttatcaggcctacaagggattcgcaatttgttgaatttgcagaatttgtaggccggataaggcgtttacgccgcatccggcatattagtttacgccgttaacagattagctatcgtgcgcacaccaagtcccgtagcgcccgcagaccactgttcaaccggcgctttacggtaagtcgcgctgcagtcgatatgcagccagccttgctgatagttctcaacaaagtggctcaggaagcccgccgccgtgctcgcgcctgccggatacgccgcgcttccggtattgttcagttcggcaaagttagacggcagctggctgcggtggaactccgccagcggcagacgccagaacggttcgttctcctgcgcggcactcgccagcaagcgaccggccagcgcatcgtcaaaactgaacagcgcgtgataatcattacccagcgcagttttcgccgccccggtgagggtcgccgcatcaatgatcatttccggtttctgcgcactggcatcaatcagaccatcggcaagcaccagacgcccttcggcatcagtgttcatcacttcaacttttttaccgttgcgataggtgatgatatcgcccagcttgaacgcattgccgctaatcaggttatccgcacagcagaggaacagcttcacgcgcttgttcagtccgcgcgtaatggcaaatgccagcgccccggtaaccgttgccgcgccgcccatgtcgctcttcatgctgtccataaacgcagtctgtttgatgctgtagccgccggagtcaaaagtgatacctttacctaccaggcacgcgtacactggcgcttctttatcgccagttgggttgtaatccagcgccagcaataccggagaacgttcactaccgcgtccgactgtgtgcagccccatataaccttgctcacgcagatcttcgcctttggtgatccgataagtcacacgatcgcccgcgacgttgctgatcagatcaacagcacgctgtgccagttggcttggtcccaattcttctgccggtgcgttgatggtgtcacgcacccagtcgatgatcatcaggcggttatccagttcctggcgctgggcatcgtccagatccggccacaccactttacgcgtgcctttcggggctttgtaaccttgccagaatgcccagcagcgatccgcatcccagccttcaccgcttaactgaacatgcttgatgcccagaccgtcaatcttgcgcgccgcacgctggatcagccccagatcgtctgccccgttcaaatgcagggtaatgccgtcattattaatgctgtaagttgctttttctccccagcgcgcgtcggcaggttgggtagagagggtaatcttcatcgcttctgtcattttagttatccttctttgtaaaagggccgccagttggcagccccaggatttttccgctaaatgattcgcgttgcaggaaggcggcaagtgagtgaagccccaggagcatagataactatgtgactggggtgaacgagcgcagccaacgcatctgcggcgtgaagcatgacgcggaaattattcggcctcgtccagccagactaacaaaatcgcttcgaggattttctcgttggatgcctgcgggtcgtcgtcgaaatcttccagatcgcaaatccactgatgcatatcggtgaatcgaaccgttttcggatcaagatcgggatacgcatcgtacagtgcttcgccaatttcgcggctatcggtccacttaagtcccatactaacctctgttaatgctcacgcgcatggttgatagtgtaacgcgggatttcgactactaaatcttcgtcggtaacgcgcgcctggcagcttaaacggctttccggctccagtccccaggctttgtccagcatgtcgtcttcctgctcactgctttccggcagactgtcaaaaccttcacgaacgatgcagtggcaggtggtgcaagcacaggatttttcacaggcgtgttcaatctcgataccgttacgcagagctgcgtcgagaatggtttcaccgctattagcttccagaacagcgccatcagggcagagatcctgatgaggcaaaataacaatctttggcatattaaacctcgtccacggaatggcctttcagcgcacgacgaacgctctggtccatgcggcgagcggcgaaatcctgggtttgtttgtctacgtttttaatcgcttgttcgatggcgtcaacatcatcgccctgcgccacttcactcaggtgagcggcagcatcgtcaatgacctgacgttctgcggcgcttaacagcgcggcatcagcagccagcgcgccgtgcagactttccagcacacgcgccgcttctactttttgttctgccagcattcgggcttttacgtcctgctcggcatagctcatactgtctttgatcatgctagcgatttcgctatcggtcagaccgtaagacggtttgacctgaatagacgcctcaacgccggtggatttctccatcgccgtcacgctcaaaagaccgtcggcatcgacctggaacgtcacgcgaatatgcgcaccgccagccggtagcgccggaataccacgcagcgcaaaacgcgccagactgcggcagtcctgcaccagttcgcgctcaccctgcattacatggatagacatcgccgtctgaccatctttaaaggtggtgaaatcctgagcgcgggccaccggaatagtggtattacgcggaatcactttctccaccaggccgcccatcgtttcgaggcccaggctcagtgggatcacatcaagcaacagcatttcgctgtctggcttgttacccaccagaatatccgcctgaatcgccgcgccaatagcgacgactttatccgggtcgatggaagtcagcggtggacgaccgaaaaattcgcctacccgttcacgcaccagcggcacgcgagtagaaccgcccaccatcaccacttccagcacttcatcagcttctacacccgcgtctttcagcgcgcgacgacaagccagtaaggttcgttttaccagtggcgcgatcagttcattgaattgttcacggctgatttcgccctgccagcccgcaacgttaacggtcacggagtccgcatcgctcagcgcgattttggctgcaatggcggcatccagcagttcacgctgaacgcggttatcgctacgatcaggaatgcccgcctgctcgcgaatgtaatccgccagcagatggtcgaaatcatcgccgccgagcgcggaatcaccgccggttgccagcacttcaaacacgccgcgacttaagcgcagaatggaaatatcaaacgtcccgccaccgaggtcataaacggcgatcacgccttcctgaccggaatccagcccgtaggcgatagccgcagcggtcggttcgttaagtaagcgcaggacgtgaaggcccgccagacgcgccgcgtctttggtgccctgacgctgggcatcgtcaaagtacgccggaacggtgataactacaccatccagctcgcctgccagggcttcagttgcccgcgccgccagtgctttgaggatgtccgcagaaacgcgcaccgggttcagcagccccgccgccgtttcaatcatcggcaggccgttttcgctggcctggaattgataaggcagatgcggatagcgttgctggatatcagccaggctgcgtcccatcaggcgtttaacagaactaattgtgttggcggtatcgagcgctgcattagtacgcgcgtcataacccacgctatgcccttgctgttgatagtgaacaacagatggcagcaggtgacggccttcatgatcggctaacgtttcggcctgaccgctgcgcactgtcgccaccaggctgttggttgtgcccaggtcaataccggccgccagacgacgctgatgcggcgcagcactcaaaccaggttcactaatttgtaataaggccatgtttagcttccagaaattaaaaatcgagcagtttttcttcgagttgttcggcactgcttcgcagtttatcgagaaaacgcagcttacgcacggtatccgccgccgcgtcccacgtctcgttgtctaactgttcaaccatcaactgatggcgggtatcaaacatctttttcacacgtttgataaagctttccagccgcgcttcatctttcgcctgttcgatctcgtccagctcttcgcgcagctccaactgttccatcaggaacgcggtgtcgcgcacagtatgctgctcgctggcgagatcaaagccgtgcaaagaaagcaaatattccgcgcgcattaacggatgacgcagcgtttgccaggcctggttaatggttgcagattgctgtacggcggcgagttgttccgcctggcttccgctggcgaatttatcaggatgatactgacgttgtagatcctgaaaacgcaggctcagcgcctgggtatcgagttgatagcgggcaggcaagccaaagagggtgaagtaatccataacattctcagggctgcgatccgccgcgataacggcgaatcaggtaaaacaaaccccacgcgcaggcgaccacggtggggttatcggtatgcgcatcaaacgtggaagctttcgccgcaaccacactcatctttgacgttcgggttggtgaatttaaacccttcgttcaggccttcttttacgaagtccagctgcgtaccgtccagaaattgcaggctcttgccatcgaccacgactttcacgcctttgtcttcaaacacgatgtcttccggcgtcggttcgtcaacaaattccagtacataagccataccactacacccggaggttctcacgcccagacgcaggccaaaccctttaccgcggttagccagaaaggtatttactcgcgctgctgcactgtcgctcagtgtaatgctcataaccaaacctcaactcttattttgcttcacgtttgcttttatagtccgcaatggcggctttgatcgcgtcttctgccagaatagaacagtgaattttcaccggcggcagttcaagttcttcagcaatatcggtgtttttgatcgcctgcgcttcgtcgagagacttccctttcacccattcggtgaccagggagctggaagcgatagcggaaccgcagccgtaagttttaaaacgcgcgtcttcaatgataccttcatcgttgactttaatctgcaacttcatcacgtcgccacaggccggtgcccccaccatgccgctgccgacgttctcgtcgttgttgtcaaaggaacccacgttacgcggattctcgtaatggtcgataactttttcgctgtaagccattataaattctcctgattccgataccgattaatgatgagcccattcgatgctgttcagatccacgccctgcttgtacatttcccacagcggagaaaggtcacgcagacgaccgatggatttacgaactaactcgatggtgtagtcgatctcttcttcagtagtaaaacgacctaaagagaaacggatagagctatgtgccagctcgtcgttcagccccagcgcgcgcagcacgtaggacggttcgaggcttgcactcgtacaggcggaaccactagaaactgcgaggtctttcagcgccataatcaggctctcaccttcaacgtagttgaagctgacgttgagaatgttcggcgcaccgtgttccaggtcaccgttcaggtaaacttcttcgatatctttgatgccgttccacagacggttacgcaggccgcgcagacgttccatctcggtcgccatctcttcttttgcgatgcgataggcctcgcccattccgacgatctggtgaacaggcagagtgccggaacgcataccgcgctcgtgaccgccgccgtgcatttgcgcttcgatgcgtacgcgcggtttacgacgtacatacagcgcaccgatacctttcgggccatagattttgtgaccggagaaagacatcaggtcaactttcaactggctcaggtcgataggcagtttacccacgctctgggttgcatcaacgtgatagataatgccacgagcacggcacatttcgccgatagccgcgatatcctgcaccacgccgatttcgttatttacgtgcatgatggacacgaggatggtgtcgtcacgcatcgctgcttcaagttctttcaggtcgataatgccgttacgctgcggtgccaggtaggtgacttcaaaaccttcgcgctccagctgacggcaggtatccagtaccgctttgtgttcggttttgctggtgatgatgtgcttgccttttttctgataaaagttggctgcacctttgatcgccaggttgtcagattcggttgcaccagaggtaaagacgatttcacgcggatcagcgccgaccagatcggcaatctgattacgggcgatatctaccgcttcttcagcctgccagccgaaacggtgagaacgggaggccgggttaccaaaggttccgtccatcgtcataaactgcatcattttctcggcaacacgcgggtccaccggcgtggttgcggagtagtcgagataaatcggtaatttcattgctctataaactccgtacatcactcaatgcaaggaatcaggctaccggctggatgtacgaccgtgtttacggagtatttagcactccggcctgattctgaattctttttattaagcgcgtaacttaacgtcgatcgcgtcttgtgtgcgggtgcgtggcgcgtcgtgagtatgctgacgaccagacacatccagcacttcctggttattaaccagttcgcctaaagtaatgttgttgagaaaaccggtgagacggtcgctcaaatcacgccacagcgcgtgggtcaggcatttatcgccgccctggcagccgcctttaccctgacaacgggtggcatctacagattcgtcaacggcgctaattacttcgccaacggcgatgctgctggcatctttgcctaacagataaccaccgcctggtccacgtacgctggaaaccagaccatttttacgcagacgggaaaacagttgttccagataagaaagggaaattccctgacgttcggaaatatcagccaacggtaccgggcccgcttcagagttgagcgcaacgtcaagcattgcggtcacggcatagcgccctttagatgtcagtctcatgtcttacttcacctcaaactcgcccctgcccggggttttttattgtaaaagtgggggtattgcatagcagggtcaagtctgacattcccgagtaaattggtcaactatttacttgactgatttagtcgggtatttaaccttcagtgccatttttttatcgtggcgtttgtacctgttgtcggatgcggcgtgaacgccatatccgccctggggttctgtacactgtaggcctgataagacgcattacgcgtcgcatcaggcaacggctgtcggatgcggcgtgaacgccttatccgacctacggttctgttcactgtaggcctgataagacgcattacgcgtcgcatcaggcaacggctgtcggatgcggcgtgaacgccttatccgacctacggttctgttcactgtaggcctgataagacgcattacgcgtcgcatcaggcaacggctgttattcggccttgttacctttattctgctgctcaatagaagccagaatcccgcgcaggatattcaactcctggctttccgggcgcgcacgggtaaacagacggcgcaatttattcatcacctgccccggatggttttcacggataaaaccggttgccagcagcgtttgttccagatgaccataaaaacgctccagatcatcgaccagcggatacggcgtctcttcatgctcgacctgctcgccgttttcctgagttgccagccaggccatgcgcacttcataggcaataacctgaaccgccatcgccaggttcaggctgctgtattccgggttagccgcaatcgcgacatgataatggcatttctgcaactcttcattggtcaagccgacgcgctcgcgaccaaacaccagcgccaccggggtatttgccgcttcagcgacgcttttcaggccgcattcgcgcgggtcgagcatcggccatggcagcgtgcgggaacgtgcgctggtgcccaccaccaggctacaaccggctaacgcttcgtcgagcgtatcgacgatgtgagcattaccaatcacatcgctggcccctgctgccagggcaatcgcctgggagtcgggtttcaccagtggattaaccagccacagattggttaatcccattgttttcatggcacgggcaacagaacccatattgccggtgtgactcgtctccaccagcacaattcgaatattttgcagcattgtctttcttcatctaaagattattcacgcatcttatcataaaacgaagacagatgccgatctcgctgctatactctgcgccgttttcccgttctttaacatccagtgagagagaccgatgcatccgatgctgaacatcgccgtgcgcgcagcgcgcaaggcgggtaatttaattgccaaaaactatgaaaccccggacgctgtagaagcgagccagaaaggcagtaacgatttcgtgaccaacgtagataaagctgccgaagcggtgattatcgacacgattcgtaaatcttacccacagcacaccatcatcaccgaagaaagcggtgaacttgaaggtactgatcaggatgttcaatgggttatcgatccactggatggcactaccaactttatcaaacgtctgccgcacttcgcggtatctatcgctgttcgtatcaaaggccgcaccgaagttgctgtggtatacgatcctatgcgtaacgaactgttcaccgccactcgcggtcagggcgcacagctgaacggctaccgactgcgcggcagcaccgctcgcgatctcgacggtactattctggcgaccggcttcccgttcaaagcaaaacagtacgccactacctacatcaacatcgtcggcaaactgttcaacgaatgtgcagacttccgtcgtaccggttctgcggcgctggatctggcttacgtcgctgcgggtcgtgttgacggtttctttgaaatcggtctgcgcccgtgggacttcgccgcaggcgagctgctggttcgtgaagcgggcggcatcgtcagcgacttcaccggtggtcataactacatgctgaccggtaacatcgttgctggtaacccgcgcgttgttaaagccatgctggcgaacatgcgtgacgagttaagcgacgctctgaagcgttaatgactcaggcgggtgatatcactcacccgccctcgcctttcaggcgctattccgaaatacttcctcactgctttactttctttcgtcactctcccaccatctttccccgattaatggatgataaagaagagccaaggaaaggttatggcactgccagtgaacaaacgcgttcccaaaattctgtttattctctttgttgttgccttctgcgtttatttagtgccgcgcgttgccatcaacttcttctattatcccgacgataaaatttacggtcccgatccctggagcgcggaatccgtcgaatttacggctaaggacggtactcgtctgcaaggctggtttatcccttctagcacgggccctgctgacaacgccatcgcaaccatcattcatgctcacggcaatgccggaaatatgtccgcccactggccgctggtcagttggttacccgagcgtaatttcaacgtttttatgtttgattatcgcgggtttggtaaaagtaaaggcacgccgtcccaggccggattgctggacgatacgcaaagtgccatcaatgtggtgcgccatcgcagtgatgtaaacccacaacgtctggtgctgttcgggcagagtattggcggggcgaatattctggatgttattggtcggggtgatcgtgaaggcatacgtgcggtgatcctcgactccacatttgcctcttatgcaaccatcgccaaccaaatgatccccggcagtggctacttacttgatgagagttacagcggcgaaaattatatcgccagcgtcagcccgatcccgcttttactcattcacggtaaagctgatcacgttatcccatggcagcacagcgaaaagttgtatagcctggcaaaagagccaaaacggttgatcctaatcccggatggcgaacacattgatgctttttccgatcgtcacggcgatgtttatcgcgaacagatggtggactttatccttagcgcgttgaatccgcagaactaacccatgatcgctagcacgataatcattcacaaaaccaccttaagacatgctaatccactggtcagaacagtttaagatgagaaaaattctgtgacgcttgccaacatttctgatgattagcattcccttcgccatttccttgagcaaactttagctattcttatcaattatgcttatgggagatctacagatgatgcctacgcttgctccaccatctgtccttagcgctccccagcgccgctgccagatcttgctgacgctctttcagccggggttgaccgccaccatggcaaccttcagcgagcttaatggtgtggatgatgatattgccagtcttgatatcagcgaaacaggacgggagatcctgcgctatcatcaactcacactgacgactggttatgacggtagctaccgggttgaaggtacagtgcttaaccaacgtttgtgtttatttcactggctacgacgtggtttccgtctgtgtccgagttttattaccagccaattcacccccgccctgaagagtgaactgaagcggcgcggaattgcgcgtaacttttacgacgataccaatctacaagcgttagtgaatctctgctcccgacggctgcaaaaacgctttgaaagccgcgatattcatttcctgtgtctgtatctgcaatattgtttgctgcagcaccacgctggaattacgcctcagtttaatccgctccaacgtcgctgggcggaatcctgccttgaatttcaggtagcgcaggaaattggacgccactggcagcgtcgggcgctccagcctgtaccacctgatgagccactgtttatggcactacttttttccatgttgcgggttcccgatccattgcgggatgcgcatcagcgggacagacaattgcgtcagtctatcaaacgtctggtaaaccattttcgtgagctgggaaatgttcgtttttatgatgaacaggggttatgtgatcagctttatacccacctcgcccaggcgttaaatcgcagtttgtttgccatcggtattgataataccctgccggaagagttcgccagactgtacccacgcctggtgcgcaccacccgcgcggcgctggccggatttgaaagtgaatacggcgtccatctttctgatgaggaaagtggtctggtcgcggtgattttcggtgcctggctaatgcaggaaaacgatctgcatgaaaaacagattattcttcttaccgggaatgatagcgagcgagaagcgcagattgagcagcagttacgcgaactaacgttactgccgctcaacattaagcatatgagcgtaaaggcatttttgcagacaggcgctccgcgtggcgcggcactgattattgcgccttataccatgccattaccgctctttagtccaccgctgatctatacggacctgacgctgacaacacatcaacaggagcagatccgcaaaatgctcgaaagtgcatgatcagcaactgggaacaactttcgggcgcaaaaacattgccggaagcgccaccagcgccattacccagaacacgccgtggcccagatattgatacaggaaaccggcgaaaacggtcatgatagcgatactgccgcccatcgcgacggcagagtaaaccgcctgtaaacggatgacttcgctaccctggcgagcagcaatataacgcatggcggccaggtggcagaccgtgaaggtgccgcaatgcagaatttgcaccactatcaaccacggcaacgccgtagttgctcccataatgccccagcgcactacgccgcaaatcgcgctgatcaacagcatatcgcgtgcactacaacggcggaaaagtttattactcagcgcaaagataatgacttccgccaccacgcccaggctccacaaataccccaccgcgctggcgctgtagccagctgcctgccagtaaatggcgctaaaaccgtaataggccgcatgtgccccctgcaataaacaaacgcaggccagaaagcgccagttctggcgaaccagcgccaaccacgcagaccaaccggtgctctcctgctggcgacttgccccttgtggctgaatcgtcggacggatgagaaagccgagcagcatggatgccacgcccaacgtcaacagcgcgaggatcacccgataatcaaacatagtgaccagtttgcccgtcagcgcgctgccaatgacaaacgccacgctgccccacagtcgcactttgccgtaatcaagcgggaactgcttttgccacgtattcgccagtgcatcggtcaacggtaccagtggactgaaaaagaggttaaagccaatcatcaccagcatcagccacgctacgtgcgcccccgcccagaaggcgacagcaaagagaagtgtcagcagtgccagcacgcgcaaggcggaaatcaggcgggaaggatcgctgacgcggggcgcgatgagcaaactcccgaggaaacgggcaaccagacctgcccccaataacaggccgatggtttctggcgttaaaccaatccctttaagccagacgctccagaaaggtagaaaaatgccgtaactaaaaaagtatgtgaaatagccgagcgccaaccagcgcgtggattgcaaaaccatgagtccctcccgtcaggaggcgttagtctggggttaatcgaatgttggtgcaagttgaaaaataagaatattcgagcctgcttcccgatgtctgtaacgccagttcacaagcactaaaaaactgagatccgcgacgcatgttgcaaaaataatgcgtaattatgccgttacgcttgccaaacgttcctgcacaatggcgatgaaatcgcgtaatgccggcttcatctcccctttcttccacgccatcagtaaagcaatggaaggcacatttccggcaatgggacgaaaaacaacctgtccggtattaaaattattcatataaccgggtatcaaagtgacgcccagccccatgcccaccagattcatggtcaccagaatattcgttgccacctggacgatatttggctggctgttttcttgcgcaaaccacgctttaacgatcggcgcaaggctaccggaatacaccggatcggtactgacgaaattcacgccatccagttgcgcggcggtgatctctttttcatgtgctaaagggtgatcaaccggtaacacaaccactaatggttcgtcaaaaagctccagataatcaatctccgggctataaacaggatggcgcattaagccgacgtcgagttcaccacggcgaattttttcctcctgttgcgtggtgattaaactcaccagctcaatcaaggtgtctggctgtctgagacgaaacatcggtaatacttttggcagtaaattcacttccgcgcttggcacaaagccaatggttaattgtctgtcttcctgaacaattttccgcgcccgtaatttggcattttccgcttgttcgaggattgccagcgcgtcctggagaaaacattctcccgccgccgtcaacgcgactttgcgcttatccctcaccagtaacggaacaccgacacagttttcaagatcgcggatctggctgcttaagctaggctgactggtatgcagtttttccgccgcacgggtaaagttcagtgcctgcgccactgcgacgaaatagcgtaaatgccgtagttccatcaccttccccttgttatcgaaaaaacgtctcagctggtagaaattaactatttcacatattagcaaccaaccagcaacatccttatggcacaaaaatagaaggtcaatacatcttatctttcaggattaaaaaatatgaccacacccagtgatttgaacatttaccaactgattgacacccaaaatggtcgggtcactccgcgtatttataccgacccggatatttaccaactggagcttgagcgtattttcggtcgttgctggctatttctcgcccacgaaagccagatcccaaaacccggtgatttctttaacacctacatgggagaagatgcggttgtcgtagtgcgtcagaaagacggcagcatcaaggcgtttctcaaccaatgccgccaccgggccatgcgtgtgagttatgcagattgcggcaacactcgcgcctttacctgcccgtatcacggctggtcttatggcattaacggcgagttgatcgatgtaccgctggaacctcgcgcctacccacaagggttgtgtaaatcccactggggactaaacgaagttccttgtgtggagagttataaagggctaatttttggcaactgggataccagcgcaccgggcctgcgtgattacctgggtgacattgcctggtatctggatggcatgctggatcgtcgcgaaggcggcaccgaaattgtcggcggcgtacaaaagtgggtgatcaactgtaactggaaattcccggcagagcagttcgccagtgaccagtatcatgctctgttcagccatgcttctgccgttcaggtattaggggcgaaagatgatggcagcgataagcgcctcggtgatggacaaaccgcccgcccggtgtgggaaaccgccaaagatgcgctgcaatttggtcaggacggtcacggtagcggtttcttctttactgaaaaaccggatgctaatgtctgggtcgatggcgcagttagtagctattaccgcgaaacctatgccgaagcagaacaacgtttaggtgaagttcgcgccctgcgcctggcgggtcataacaatattttccccacgcttagttggctaaacggcactgccacactccgcgtctggcatccgcgcggccctgatcaagttgaagtgtgggcgttctgtattactgacaaagccgcctccgatgaagttaaagccgcttttgaaaacagcgccactcgtgcttttggtcctgctggttttctcgagcaggatgacagcgagaactggtgtgaaatccagaaattgcttaaaggccaccgcgcccgcaacagcaaactgtgtctggaaatggggcttggtcaggaaaagcgccgcgacgacggcattcctggcattactaactatatctttagtgaaactgccgctcgtggaatgtaccaacgctgggccgatcttctgagtagcgaaagctggcaggaagtgctcgataaaaccgccgcttaccagcaggaggtgatgaaatgagtgcgcaagttagtctagagttacatcaccgcattagccagtttctctttcacgaagccagcttactggacgactggaaatttcgtgactggctggcgcagctcgacgaagagattcgttacaccatgcgcaccacagttaacgcgcaaacacgcgaccgccgcaaaggcgtccagccaccgacaacctggatttttaatgacaccaaagaccagctggagcggcgaatcgcccgtctggaaacgggcatggcctgggcagaagagccgccgagtcgcacccgtcacttaatcagcaactgccagataagcgaaaccgacatcccaaacgtatttgctgtgcgggtaaattatctgctttatcgggcacaaaaagagcgcgatgaaacattctatgttggaacgcgtttcgacaaagttcgccgtctggaagatgacaactggcgcttgctggaacgggatatcgtcctggatcaagcggtaatcacttcccataacctgagtgtactgttctgatgaatcgaatttatgcgtgtcccgttgcggatgtgccggagggtgaggctctccggatcgataccagccccgtcatcgccctgttcaacgttggcggcgagttttatgccattaacgatcgttgcagccatggtaatgcgagtatgagtgaagggtatctggaagatgacgccacggtggagtgcccgctacacgccgccagtttttgcctgaaaacggggaaagcgttatgcctgcccgccaccgatccgctcaccacttatccagtacacgttgaaggtggtgacattttcatcgacttaccggaggcgcagccatgagcgatctgcataacgagtccatttttattaccggcggcggaagcggattagggctggcgctggtcgagcgatttatcgaagaaggcgcgcaggttgccacgctggaactgagcgcggcaaaagtcgccagtctgcgtcagcgatttggcgaacatattctggcggtggaaggtaacgtgacctgttatgccgattatcaacgcgcggtcgatcagatcctgactcgttccggcaagctggattgttttatcggcaatgcaggcatctgggatcacaatgccagtctggttaatactcccgcagagacgctcgaaaccggcttccacgagctgtttaacgtcaatgttctcggttacctgctgggcgcaaaagcctgcgctccggcgttaatcgccagtgaaggcagcatgattttcacactgagtaatgccgcctggtatcctggcggcggtggcccgctgtacaccgccagtaaacatgccgcaaccggacttattcgccaactggcttatgaactggcaccgaaagtgcgggtgaatggcgtcggcccgtgtggtatggccagcgacctgcgcggcccacaggcgctcgggcaaagtgaaaccagcataatgcagtctctgacgccggagaaaattgccgccattttaccgctgcaatttttcccgcaaccggcggattttacggggccgtatgtgatgttgacaagccggcgcaataatcgcgcattaagcggtgtgatgatcaacgctgatgcgggtttagcgattcgcggcattcgccacgtagcggctgggctggatctttaaggaagcacgatgaaagaaaaaacgatcattattgtcggtggcgggcaagcggcggcaatggctgcggccagcctacgccagcaagggttcaccggtgagctgcatctgttttccgatgagcgacatcttccttatgaacgacctccactcagcaaatccatgttgctggaagattccccgcagttacagcaggtgttacccgctaactggtggcaggaaaacaatgttcatctgcattccggtgtaaccatcaaaacgctgggtcgcgacacacgagagttagtgttaaccaacggcgaaagctggcactgggatcagctttttatagcaaccggcgcggcagctcgaccgctgccgttgcttgatgcactgggagaacgctgctttaccctacgccatgccggtgatgccgccagactgcgagaagttctgcagcccgaacggagtgtcgtgattatcggtgccggaactattggtctggaactggctgccagcgccacgcagcgcagatgtaaggtgacagtgattgaactggcggcaaccgtcatgggccgtaatgcaccaccgcccgtgcaacgctatcttttacagcgccaccagcaggctggtgtgcgcattctgctcaataatgccattgaacatgtggtcgatggtgaaaaagtagaactgacgctgcaaagtggggaaacgcttcaggctgatgtggtgatttacggtattggtatcagcgccaacgagcaactggctcgcgaggccaaccttgatactgccaatggcattgtcattgatgaggcttgccgcacctgcgatcccgcgatctttgccggtggcgatgtggcaatcactcgtcttgataatggtgcactacaccgctgcgaaagctgggaaaacgccaataaccaggcgcaaattgccgctgccgcaatgttagggctaccgctaccgctactgccgccgccgtggttctggagcgatcagtacagtgataacttacagtttattggcgatatgcgtggcgatgactggctttgtcgtggcaacccggaaactcagaaggcgatttggtttaatctgcaaaacggcgtgcttatcggtgcggtcacgctgaatcaggggcgtgagattcgcccaattcgcaaatggatccagagcggcaaaacgtttgatgcgaaactgctgatagatgagaacatcgcgcttaaaagtctgtaaccaggataattagcgaatatctcaatgcctggggcgtggcgaggtgcaagagtgtgtattacgtttaaaagtcattatcttgcaaagggattggttatgaacacactacgttattttgattttggagctgcccgccccgttttgttattaattgcccgtatcgccgtggtcttaattttcattatttttggttttcccaaaatgatgggctttgacggtacggtccaatatatggccagcttgggcgcgccaatgccgatgctggcagcgattattgcggtagttatggaagtgcccgccgcgatattaatcgtgcttggctttttcacccgtccgctggcggtgctgtttattttctacacgctgggtacggcggtgattggtcaccattactgggatatgaccggcgatgcggttgggccaaatatgattaatttctggaagaatgtcagtatcgctggcgcgttcttgctattggcaattaccgggccgggggcaatttctctcgatcggcgttaagaaagatgccggatgcggcgtgaacgccttatccggcatttaataaattacagccactctacccgcaagctcatctcactagttgtactttcccctggtgctagcgcaatgagatcacccccttccgggcgatgatgatcatccggcgcatggctcatcggttccagacagaagaaatcaaacgcatatcctttatcaaacgcagggtcggaaacaaagatgaaataacacggtgcaggtggcgtcgtttccatgatgatggcataaccttcctgcggctgctcgatgcgggcctgaccattccatccggcaaaaccattgttcacccactggcgcggcaacggcgcgggctggttaaaatccagttcctgcggtagctgctcgcaaaactcacccgccagccactgctcccgctccagccagtaaccgctcgcctgtgcctgaatccgcgtttgcgggctcaacggaaaataaggatgccagccggtaccaaatggcagcgtctctgccccttgattggtgacagagagcgtcaccgtcagcgtatccgccgttaaatgaaacgcctgacttacccgatagtgatagacaccgctgcgatgttcatacaccagacacaaactatcatcgctgtggctgacacattgccactcgcccagccagccatcgccgtgtagatagtgcgcatcccactcaacattcggttgcagttgatactcacgcccctgccagacaaaacgattgccgctcacccggtttgcaaatggcaccagcggaaaacaactggcatcggttgccacaccgctttttttaccaggacgtaagagcggcgtcgtatcgcgccagaagccttcgattacgccgccctggtcagaaacgtccagctttaggctcccgtgggataaggtatagatggtcatccgctaactccttaatccgggaagttaatcacaactttcccgcatttgccgctcgccatcagcgcataggcatcacctgcctgttccaggctgaagcgatgggtaatggcgttacgcggccacagcttccagtccgtcagatcatgggcgcatttttccatatggaacagactggtcacccaggagccgataatccgccgttgatggtgcatcagatcggcgctgacctcgaattccacttttccggtttcaccaatgtaaaccacccgtccccagtcagcggtggattgcagtgccagcaagcgacctgcggcattaccggaacaatcgagcgcaacatccgcgccaccgtgggtgagttcggcgataatctgcggcagaccttcggtggttgctaaatagccgtgatccatcacccctaactgttttgccatcgccagacgttccggcagcatatcaacgccgatgatccgttttgcaccgcgacctttcgccagcatcatcgccatcatgccgactggccccagaccgaccaccagcacgttatcactgccggaaacttcgccgcgcaaaattccttcatacgctgtaccaacgccgcaactgataaacgcaccatcttcgtagctcagcgcatccggcaggaggatcagatctttttcttccgccagcaagtattcggcatgaccgccgtcacgctgccagccgtaagccgcttttccttcgccagtacaagaaataggaaaaccgcgacggcagttcgggcaaaaaccacagccagaaatgtgatacaccagcacgcggtcgccctctttaaaatggcggcagccttgccccatcgccacaatctgcccgcacggttcatgaccgttgataaagccctggtataacggtttatcgggtgccgccgctgtggcacggtgttgatgatagatatagtggacatcgcttccgcaaatcccggaggatttcattttgatcagtacctggttaatccccggcgtcggcaccgcaacttcccgcagatcgacggtgctatttcctggtaaataagctgccagcatcgttttcataaatccctcattaacaatacgattaattttcatccctgccgcacccgcgccaggggcgttaaggtttagcgtttcgctttactgcttcgctgggtcagcaagatattcgccagcaccgccaccacgatgatgacgccgcgtaccacctgctggaaaaaggagttaataccgagcagcaccagaccgttaccgattagcgtaatcaccagcacaccaagcaatgtaccgaacagggaaccgcgaccgccggaaagtgccgtaccgccgaccacgaccgcggcgatgacgtcaaactccagaccgtttgcggcacctgcgttaccagaaccgaggcgcgccgccaacaaaatgccggtcaccgccgctaataatccgctaagggtaaagataagaatgcgcacccgacgaacgttgatgccgcacaactgcgccgccgtagcattaccgccaacggcaaaaacgctgcgcccgaaggcggttttgcggctgatgaacacaaacagcgcaaacaacacaatcatgatcagcgcggataccggcacaccgagaaattgtccgcccagccagtccagcacctcgttttcatcaatcggcactggcagtgcgttcgtcataaacagccccattccgcgcagggcgctccacagccccagtgtggcaacgaaacttggtacattaaacacgccgcgcagcaccccggccagcgttcccatcagcgcgcctaacagcaacaccagcaggcacgccaccgccagcggaacttcaaattgcagcaaaaatgccaggcacacgctgacaaaagccaccatcggcccaacgctgacatcaatttcaccggagataataatcagcgtcatcgcccaggcggcaatcccaatggtggcggcatcgcgcagcacgttcatctggttattcaaactgataaagccaggcgcgttcagggagaagaccagataaagaatggcaatcaccaccagcaaaccgatctcattaatatggcgactgacaaattgtttgaggctgacgctcttgccctgcggcaatggtaaactgctagcagacatcttcaggttcctcggtaaaattcatcagtgcacagacagaatggcggacatcagctcatccacattgaccggagcgtgaaactcctggctgaacgtgccgtgctgtaataacaggatgcggtcacacaccagcggcaactcctccacttcactggagataaacaccacgctttttccttcggcagccagctcacggacaatacggtaaatctgctgtttggcttcgatatcgacgccgcgcgttggctcgtcgagcaacaaaatctggctggcagcatagacccaacgaccgatcaccactttttgctgattgccaccagaaagcgtgccgatgggtgtttcgctactggcggccttgaccgtcatccgctgcatcacctcttcggtcaggcggcggatggtggaccattgcagcacaccgttggcgctgattttttgccgattggtcagcactgtattttcgtcaacgcccaaccagggaatgatccccgcttctttgcggttttctggcgtatagccaatgccgcgtttcagcatgtcgccgtaatcggggcgcgtgattttctcgccgttgataacaatttcgccctgttcatactcctccagcccaacaatcgccttcagcaattcactgcgccctgcccccagcagaccagcaatgccgagcacttcgccacgacgtagcgtaaaactgatatcctccagcttgggcttatggcgtaacgcacggacttccagcacggcctgatccacaatttcctgaggggctaccggcgcaatatcaacgtgatcgcgcccgagcatcaggctcacaatatgatgcgtggaggtgttttcgagcatcacatcgcccgccacctgaccatcgcgcataacggtggcacaggaggcaatgcggcgaatttcttccatccggtggctgacataaatcaccgccacgcccagtgcgctcatctttttcaccgcgctgatcaccagttcaacttccgcactcgcaaggctactggtaggttcatcaagaatgaccacgcgcggctcgcccttcatcacccgcgcaatttccaccagctgcttttgcgccgggcttagcgtactaacaagttgttcaggactaacgtcaacgcccagcgcctgtaagcaacgttgggcatcctgcgccatttgcaggtaatcaatcatgccgttgcggcggggccactgaccgaggcagaggttttccgccactgtcagcccttccaccagacttaactcctgataaaccgcgcgcacccccagttcagcggcacggcgagtcagcgtagcttcgtcaccttccagtcgcgtctcgccaatccagatatcaccgctatccgggcgttcgctgccggtaagcattcgaatgagagtgcttttgcccgcgccgtttttacctaacagcgcacgaacttcgcctttattgagcgtgaagttaacgttatccagcgcaacgacgccgggataacgcttatttcctgccaccacttttgctaccgggactgcctctgttgccgtgaacatagggacctctgcgaatcagcgattagggcagaccatcaacgtgcgttgccagccactgtttaccgtcttccgttttggtatagagatcgataggcacctgaatcactttttcaccgtcggcttgtttattgataaccttcaatgtttgcgcgaaaacagcattgcccattttcttaccggaaatatccactaccgctttcagcacctgattgttttccagctcctgagcaatttcggttgtcatatcgctaccgaaaacagcaatttttccggcctgattttgattacgtaccgcttttaccgcgccgagtgtcgcaccgccgctttcccccataatggcgttgagatccggcgtggagataattagtttttcaccaacggaaatcgctttatctaaaacagtcccttcctgattagcgacaatttgcgcgccgggaacgcgggattttaaaacttcttcaaatcctttacgtcgctgcacacaaacttcaaaggcttcgcaattgatgacggcaattttcggctggtcaattttattggcaataaaataatcagcggcagcgttacccagttttttaccaaattccagcggatcgccgaccagatacgcgctgacatatttatcgacccccttttgattaatacaggtgttgtagcaaatcaccggaatgcccgcttcactggcgcgacgaacggtacggctactgccattttcagacactgcgcttaaaataatggcatcgacattacgcgccacgagggtatcaacaaaggtactttctttgctaatatcaccctgggcgttagtttctattaactgaacttgtacactggaatcttttgccgcatcctgaacgccctgacgcactccagcgtagtatccctgagtatcaaggtatattgcgccaatggtcatttctttttccgcagccctggcaaatagtgcgctacctaatagcgtagccattaataatagattacgggttgttctcatttttgtaggcatagagcctcctgtagggtttttattaacaacggcttattctaattattttgtgatgagcggcagcgcgtgccgctcaaatattacagttaatagggtttagtgaacgcggttaaaaataaaaggcatcacggtggtgaataatgccgctttcggccaagccggattaatcgccgtcaattcagcgcgagcagactcatattgcgcaacctccccgagtcccgcggacgccagcatcgccaccatcaggcatttttctttatgctgctgttgtaaatcgccatacaggctcaacaagtcaggttggctgacggcaaagaaatccgcttcgatactggttttcgccatctcttgcgcccactgtttcatttcactaaacagttgctgtgcggtttgttgttcgcccagcagtcgcagcgccatcccttgccagaagagataatcaaccggctgatcgttgtaataactgtgaatgttaatagtgcgatcgccggtcgccgccagacgtaaacaacgcgtcgcttcagtttcatcgccctgcgcgttggcgcatatcgcctgccagaaccagatgtcgttatcagtttgccccggtaaacggccttcgcttaaattctccggataatgcagcgcggcatgaagcagttcgcaggcctgctgcggctgtctggcatcaagatgctgccaggcgcgtaataactggttgaggataaactgactggtgaccttcccttccccgccttcccacgggtggaatttgcgcgtggcgagaatgtccgccgctttgtctgcctgacccgtgagatgccacaaattgagcagttctgcggtcatgtcgtcgcgtttcagcgcaatttccagattattttccagacgcgccagtcgtttctccggtgtggctccacttaacttatccagcaaatcccgttcgaaaagcagacgtgcatcctgcggcgcaagctgataagcattatcaagataacgcgcggccagctcataatcgtgttgcttattccacgcatggatcgctaacccgcgccagccgtcggcaaactccgggctcatctctacgcaacgttgccaaaaggcaatggctttgttgtagctacgtttgttgtagtagaagcaagctagtaaatggcgagcaaaccagcactcttcaatactctccagcgccgccacttcttccagcgtattcgggaaacggacaaactgcgggaagacatcaatggcttttgcgaccagttcgccacgttcggctttcggcagcaagctggcttgcaggtaaagcggcagcgtgcgctggcagtccagtgcgttcagcatctctgccgccagggtgggcattccccagttaatcagttgcccggcggtcatcagggcgttaacgtcgcgtccctgacacagaccgcgccactgcgcgagagcactttcgctacgaccatcgaaccagttcagccaccacagagtggcgttcagcggataatcgcgcagcagtttctcgcgctgcacacgcgcgttgtcctgacgaccacttaacaccagcagcagattatgcaggcaaagcacttcctgattggttgggcaggcgcgaagactttgttggcaaaaatccagaccagcgtcgaagttaccattacgcgccgccagtcgtgccaggccataatagccaccggctttgctgttgccgctccagaccgcacgccagaaatcctcttcggcttgttgatattgtccctgacgttcgtaagcactggcgcgaatcaaactcgcctgtccgcactgcggatttttgttcagcgcatgtgcgcgtttcagagcctgagtggcatacgccaccgcttgcgggaaatctgcgcggttatattccagcatcgccagcgccaggttacagcgataatccagcgggtccagcgccacgccgcgcaggtagtaatcgaacggactacggctggcgtgatgatattgctccagatgctgaccgataaaccaggcttcatctgtactggtaatgtcttgtgctgccagtggcgctttggcgacgtccggtaacggcaacgcttgcggctgatgttcctgataactcagtacaatattgccgtcggcatcggagagctcaatggtcagcctttcaggattgataccgtgcaacacgccctggatggcggtcgcaggcatcagtgccacggcatcatcaagtaacgcgttgcatttaccgatttcgcggatcgccaggcggtatccgttcaacggagagatggcatacagcccccactcaatcccccgcttactacgctggagttttatcaccgcatcgcgggaggcattttgcaccatgcccaaagaatgataaggcaggaaatactgctcaaaacgcttctcttcgtaagcatcaagccaggtaaaatcgggctggttatcggcaaaaataccggtcatcagttcgatatacgggccgttattgtcggtcagactcttatcccacgcctggccaaattcactgtgtccccaactccactgttttttacctggcgcaatatggtggttggcaacgtgcagcaaaccgccatcttcatcgtgacaccacgcgccgacaaaatcgtactggcttttttcggccatataactggttggaacaggcacatttttatagcgagaaatgtccactccagcggagtagtccactttgtagtaagtgccggtagcgatggggaaagcggagacggcccgtttgccgtgatcaaacaccgccgttacatccggcgggaagacgctctgatgcccttccccccctttcactgccgggttggcccaccacaagaaatgacgcggcgtggcgttcccgttatagacgcggctggcgatttccagcgccgcccggtcagggcgcagggtgaaacctgtcatcacctgtaaaccatgcatcggctccgtttcgcctacccacaccgtctgtgcaccgtcttcatgggcttcgagggtgaaatcaacgggcataaaggtggtcgggcgatgatgttgcggccagttaaactcaatcccaccggaaatccacggccccagcagccccaccagcgcaggtttaatgacttcattgtgataaacaaaatcgcgctgtttcactttatcccacgcgcgatgcacccgaccgcccagttccggcaggatcatcactttgatgtagtcgttttccagccacaccgcctgccaggatttcagggttttctgctcgctcagcgtatcggtcacgccgtagggataaaccgcgccggagcttccctgataaacgcgattttccaggaacatgggatgtatatcctgcggcccggtttcataggtcgggatctcaacgcgctcttgccacacttttactggagtcatggtgccctcaatattaacaagacatactgaattaaaagatttgtggcagtgtattgaacaatctggcaatgttttcgcggaataatcacgcaattaactaaacaaggtttagtgaagatgagagcctgcattaataatcaacagattcgccaccataacaaatgcgtgattctggaactgctgtaccggcaaaagcgcgccaataaaagtacgctggcccggctggcgcaaattagcattccggcagtcagtaatattttgcaggaactggaaagcgaaaaacgggtggtgaatattgacgatgaaagccagacgcgcgggcatagtagcggtacatggctgattgcgccggaaggtgactggacgctgtgcctgaacgtgacgcccaccagtattgagtgtcaggttgctaatgcttgtttaagtccgaaaggtgaatttgagtatttacagattgatgcaccgacgccgcaggcgctgctgtccgaaatcgaaaaatgctggcatcgccaccgtaaattgtggccggaccataccatcaacctggcgttggcaatccacggtcaggttgatcctgtgaccggcgtgagccaaaccatgccgcaagcgccgtggacaacgccggtggaggtgaaatatctgctggaagagaagctcggcattcgggtgatggtcgataatgactgcgtgatgctggcgctggcggagaaatggcaaaataatagccaggaacgggatttctgcgtgatcaacgttgattacggcattggcagcagcttcgtgattaacgagcaaatttatcgcggcagtttgtatggtagcggacagattggtcacaccatcgttaatccggatggcgtcgtctgcgactgtggacgttatggctgcctggaaactgtcgccagcttaagcgcattaaaaaaacaggcgcgggtatggctaaaaagtcaaccggttagtactcaacttgatcctgaaaaactgactacagcgcagttaatcgctgcctggcaaagtggagaaccgtggatcaccagctgggttgatcgctctgccaatgccattggtttgagtctgtataacttcctcaacatcctcaatattaatcagatttggttgtacggtcgcagttgtgcctttggtgagaactggcttaatactattattcgccagacaggatttaacccgttcgaccgcgacgaaggaccgagcgtgaaagcgacgcaaattggctttgggcaattaagccgcgcacaacaggtgctgggaattggctatttgtatgttgaggcgcagttacgacagatttgatggcgcgataacgtagaaaggcttcccgaaggaagccttgatgatcataaacgaaaaattgcctgatgcgctacgcttatcaggcctacacggagattgcaatatattgaatttgcaaagttttgtaggccggataaggcgttcacgccgcatccggcatgaacaacgagcacattgacagcaaatcaccgtttcgcttatgcgtaaaccgggtaacgtgcgcagatgtcgagaactttacctttgatgcgctcgataacggcttcatcattgatgctgtccagcacgtcacacatccagccagccagttctttcgcttcggcttctttaaagccgcgacgggtaatcgccggagtacctacacgaataccggaggtcacaaacgggctcttcggatcgttcggtacgctgtttttgttgacggtgatgttagcacggcccagagcggcgtctgcttctttaccggtcaggtttttatcaaccagatcaaccaggaacaggtggttatcagtgccgccggaaaccactttgtagccgcgctcgaggaacacttctaccatcgctttagcgtttttagcgacctgctgctggtaagttttgaactcaggctccatcgcttctttcagagcaaccgctttaccggcgattacgtgcatcaacggaccgccctgaccaccagggaaaacggcagagttcagttttttgtacagctcttcgctaccacctttcgccaggatcaggccgccgcgcggacccgccagggttttgtgagtggtggtagtaacaacgtgagcatgaggaaccgggttcgggtagacgccagcagcaaccaggcccgcaacgtgcgccatatcaacgaacaggtaagcaccgatgctgtcagcgatttcacgcattttcgcccagtccaccacgccggaatatgcagagaaaccaccgataatcattttcggcttgtgttctttggcttgtttttccagatcggcgtagtcgatatgaccggtagcatcgataccgtaaggaacgatgttgtacagtttaccggagaagttaaccggagaaccgtgagtcaggtgaccgccatgcgccaggttcatacccagaacggtatcacctggttccagcagcgcggtgtagaccgcaaagttagcctgggagccggagtgcggctggacgttagcgtagtcagcgccgaacagttctttcgcacgatcgatcgccagttgttcaacgatatcaacatactcgcaaccgccgtagtagcgtttgcccggataaccttcagcatatttgttggtcagctgagaaccctgcgcctgcattacgcgcgggctggtgtagttttcggaggcgatcagttcgatgtgctcttcctgacgtactttttcctgctccatagcctgccacagttcggcatcataatcggcaatgttcatttcacgctttaacatccgcatctcctgactcagctaacaataaaatttttggcctttataggcggtcctgttggacaacggcgaacagtataaccgaatcattgtgcgataacaggtcttgacaaaggaatttacgcaaacgattaccttcaggctacgcaaggctttggagaataaagagcttgcaaccggaaacggatttcttttcaggtttgtgatgcaaatttttcacttcatcacattctttctgaaaaacaccaaagaaccatttacattgcagggctattttttataagatgcatttgagatacatcaattaagatgcaaaaaaaggaagaccatatgcttgacgctcaaaccatcgctacagtaaaagccaccatccctttactggtggaaacggggccaaagttaaccgcccatttctacgaccgtatgtttactcataacccagaactcaaagaaatttttaacatgagtaaccagcgtaatggcgatcaacgtgaagccctgtttaacgctattgccgcctacgccagtaatattgaaaacctgcctgcgctgctgccagcggtagaaaaaatcgcgcagaagcacaccagcttccagatcaaaccggaacagtacaacatcgtcggtgaacacctgttggcaacgctggacgaaatgttcagcccggggcaggaagtgctggacgcgtggggtaaagcctatggtgtactggctaatgtatttatcaatcgcgaggcggaaatctataacgaaaacgccagcaaagccggtggttgggaaggtactcgcgatttccgcattgtggctaaaacaccgcgcagcgcgcttatcaccagcttcgaactggagccggtcgacggtggcgcagtggcagaataccgtccggggcaatatctcggcgtctggctgaagccggaaggtttcccacatcaggaaattcgtcagtactctttgactcgcaaaccggatggcaaaggctatcgtattgcggtgaaacgcgaagagggtgggcaggtatccaactggttgcacaatcacgccaatgttggcgatgtcgtgaaactggtcgctccggcaggtgatttctttatggctgtcgcagatgacacaccagtgacgttaatctctgccggtgttggtcaaacgccaatgctggcaatgctcgacacgctggcaaaagcaggccacacagcacaagtgaactggttccatgcggcagaaaatggcgatgttcacgcctttgccgatgaagttaaggaactggggcagagtctgccgcgctttaccgcgcacacctggtatcgtcagccgagcgaagccgatcgcgctaaaggtcagtttgatagcgaaggtctgatggatttgagcaaactggaaggtgcgttcagcgatccgacaatgcagttctatctctgcggcccggttggcttcatgcagtttaccgcgaaacagttagtggatctgggcgtgaagcaggaaaacattcattacgaatgctttggcccgcataaggtgctgtaatttgatgttgccggatggaaacatccggcaacccttgacgcggtttaaattgccgcgtcgtcctcttcaccggtacggatgcgaatgacccgtgccacgtcaaagacgaagattttaccgtcaccgattttgccggtttgcgccgtgcgaataatggtatcgacacaggtatcgacaatgtcgtccggtacgacaatctcaattttcactttcggcagaaaatccaccatatactccgcgccgcggtacagctcggtatggcctttctggcgaccaaagcctttcacttcggtcaccgtcatgccggtaataccgacttcggccagtgcttcgcggacatcgtccagcttgaagggttttataatcgcatcaatctttttcatgctattccttgaaaaggtcgcctgtcttttgatctgctaaacgtaacacataacgccaattcattccttgaaatcgtttgcatccagctcgtgtcgggaaagcagtttataaaattctgtccggttgcgccccgccattctcgccgcgtgggtgacgttgcctttggtgatttgcagcagcttacgcaaatagttgagttcaaactgattacgtgcctcaacaaaggttggcagcgccgtattttcaccctccagcgcctgctccaccagcgcatcactaatcaccggagaactggtcagcgccacgcactgttcaatcacgttgaccaactggcgcacattacccggccagctcgcggtcatcaggcgtttcatcgcatcggtagagaacgcgcggacaaacggtttatgtcgctctgccgcctggcgcaacaggtgatttgccagtagcggaatgtcttctgtgcgctccgccagtgccggaattttcaggctgacaacgttgaggcggtaatagagatcttcgcggaattccccgcgcgccatcgcttttggcagatcacggtgagtggcagaaataatccgcacattgatatcaatatcgcggttactgcccagcgggcgcactttacgctcctgcaacacgcgcagcagtttgacctgtaacggcgcaggcatatcgccaatttcatcgagaaatagcgttccgccttccgccgcctggaataaaccttcgcgattgctgacagcgccagtaaacgcgccacgcgcatgaccaaacagctcgctctccagcaattgctcgggcaatgcgccacagttaatagcaataaatggtttgctgttgcgcgggctggcgttgtggatagcctgggcgaaaatctctttcccggtgccgctctgaccgttaatcaaaacgctgacgtcactttgcgccaccagccgcgcctgttccagcaaacgcagcatcagcgggctgcgggtgacaattgcctcgcgccagcgttcatcggtggctggcgcggattgctccagcgcatcgtcaattgcctgatatagcgcgtctttgtcgacaggcttggtgaggaaactaaaaacgccctgctgtgttgcagcaacggcatcgggaatagaaccatgcgcggtaagaataattaccggcattcccggctgcactttctggatttcagcaaacagctgcataccgtccatttcatccatccgcaggtcgctgatgactaaatctactttttcgcgattcagtacccgtaatccttcagcgccactttccgccgtgaccacactgtagccttcgctggtcaggcgcaggccaagcagtttcagcaatcccggatcgtcatcgaccaataataaatgcgcaggtttatggctcatcaggagtgacctcatgggtggatggcgcgggcttttcactctcgtgcggcgtatccgggctgaaatttccagccggtttgcgggtgctgagctggcgttcaatatcggtcaggttttccagcttgcgggtggtgagttccagttgctgctgtagaacgtgatgttgctggcgcaatgtatccagctcgctgtcgctggactgctggagtttactgtaacgttggcgctcttccgccagttgcagttgcagcgcctgaccatcgcgccagagttgatacagtgggcgaacctgtgccgggatctcggtacttaacgcttcaatacgcgcgaccagctggcggcgctcatacggcgtaattttggcgtcggcgagcaaaatcccttgtttaaaggtattttgccagctgccgtcgtcatattggcgagcttgctgacggctctgcgcaggcattaaacgatcagcacaatccatcgcccgcagccagtaaagcggattggtttcggtacttttaccttgcagcgcccagatgtcgctacattcagtagaaagatagtcagccagttgataaaccggaattttttcttctgctggcgtatcaatggctggcttattgtgattctgcacgcaacccagcaatgccagacatggcagccctgccagccacagccgtcggggcaataatcgttgaaaaatgtgtcgcatattcaccagacttaaagcctatcccagtgggcgtaattgttgcagacagtctggacatggacagcgcggagaaaccggagcgtacatatcgtacgtgaagatttcgagcactgcccggggccgaactgacaaataaaatagcctgataggataggctgttagcattatttcgtgtttttgctgctcggtaattcaatgcggaaacaaacgtcttgcccgctctcgtcgaccagatacagttccccttgcatacggcgaatacaatccctggcaatgcttaatcccagaccgctgcccttcaccgccccttttcgctggtggcttccctgaaaaaagggttcgaagatcatggcgcgttcctcttgcggaatgggcgtgcctgtattgatgacatcaatataaacccgcgcaccatgtaaactgctgcgaaggcaaatgttaccggattcagccccgtagtgcaccgcattggagtaaagattatccagtacgctcatcagcagcattggctccgccaggcaagctgttgctttgagatcgacgtcggtatgcatcattttagcccgtgcgggcaggctatgagcagaaaccactgtctccaccagcggtgctaactcaacattctccagttccaccgcactgtccgcctgtttacggttgtaatcaagcagttgttcgatcagtttttgcaaattgcggctgctgctatcaagaatgctcaccacctctttttgctctggcgtaagcggcccgacaacctggtcagccagtaattcagtgccctcgcgcatactcgccagtggcgtttttaattcatgagataaatgtcttaaaaattgatggcgttgggattccagccaactcaggcgctcacttaaccaaagaatacgttgcccaacgctgcgtaactcgctcggtccactgaagctgacgctattgcccagagaacgcccttcccccagacggttgatcatgcgctcgatatttttcaccggcccgataatcatccgcgtgaaaagcagtaccattaccagactcaccagaaatagcaccaggctttgccaaccaaaatattgcccacgttcggcgatttcacgctgaagctgctgcccacgagagaacaccactgtgcgcgtggcctgtaccatttcggtattggcactggcaaaggcttcaagacgtgcggcggcggcagcatcgggaccgctgttgttacactgaagttgagccagattgtgcaaatcctgacgtaatgcctggtagagtttatcgtccggcagcacgcctgcgtgggcatcgagcatttcgctgtaacgcttgcgctggctttgataaaccttcgccagggttgggtcgtccagcacgcaatactgacggtaactacgctccatctccagcgccgcgttggtcatcgcttcactgcgccgggcatcaataagcgtagtgcggttaaccagcgccgcctgatcgctaagcgcattcaggctttgccaggcttgccatgccagcaccaacaggggcagcagaatcagcaaaaatgccagcattaccagttgtcgtaaactgcggggaaaaacgggccagcgtttcaaggtgttactctcgtcagacgcgaatagcctgatgctaaccgaggggaagttcagatacaacaaagccgggaattacccggctttgttatggaataaggcggtgcctaactcgacgtttcgcccgatggttgatatagctacgctgatatcagaagttggacggcaggcaccttgttgtgcgtcattcgtattttatgtagcacgtcccgaaggggctgacataagtcggtgaatgagccactggttactattatgcagtaactgtgccaataaagaaaatagtttggtaacgtactgattatacgttgctttgaggggtttatgtctcctccgctgtttgaatgtaaatcagccactgtgtcgctaaaaagagacaacttaagataaacttattagataatattaaaatcaatgagttaagtgtcgccagaaagcgacacggcaaaccacccattgtcgtgatttacagacacaaaaaagctcccggagttgggagcttatgatagtggttggtgcttaatgccgcatccgggctgcaaaaccaatgggctgacgacttaccccaactgcttacgcgcattgcggaaaatgcgcatccatgggccatcctcgccccagttttccggatgccaggagttgctgacagtacggaaaacacgttccgggtgcggcatcataatggtgactcgaccactttcagtcgtgactgccgtaataccgttcggactaccgttcgggttagccgggtaggtttcagtgactttgccgaagttatcgacatagcgcagtgccaccagccctttgctttccagtgccgccagatgcgccgcatcacgcacttccacgcgcccttcaccatgagagacagcaatcggcatttggctgcccaccatcccctgcaacagcagagacgggctttgggttacttcaaccaggctgaaacgcgcttcaaagcgatcggaggtattgcgcacaaaacgtggccacaactcactacctgggatcagttcacgcagattagacatcatctggcaaccgttacatacccccagcgccagcgtttgcggacggtggaagaaggttgcaaactcatcgcgtacacggtcattgaacaggatactcttcgcccaaccttcaccggcacccagcacatcaccgtaggagaaaccaccgcacgcgaccagggcgtggaaatcttccaggcccgtgcgtccggtcagcaggtcactcatatgcacgtcgatagcatcaaagcctgcacggtggaaagctgccgccatttcaacatggctgttcacgccctgctcacgcagtacggcaactttcggacgtgcgccagtggcaatatacggtgctgccacatcttcgttgatatcgaagctcagttttacattcaggcccggatcggcgtcgttagatttcgcctgatgctcctgatcggcacactccgggttgtcacgcaggcgctgcatctgccaggtagtttctgcccaccagacacgcaacgtggtgcggctttcgctgaatacagtctgcccgttggcggtaatcacaaaacggtcaccggaaaccgcctgccctacataatggacacaatcagcaagcccatgctgtgccagtacggactcgaccgcttcacggtcagcggcacgaacctgaatcaccgcacccagttcttcgttaaacaacgccgccaggcgatcgtcacccagagtggcgatatccgcgtcaatgccacaatgaccagcaaaggccatttccgccagcgttaccagcaggccgccatcagagcggtcgtgatacgccagcagcttacgctgtgcaaccagcgcctgaatcgcgtcatagaagcctttcagttgcgcgacatcgcgtacatctgccggtttgtcgccaagctgacgataaacctgcgccagcgccgttgcgcccagcgcgttattgcctttgcccaaatcaatcagcagcagtgcgttatcttcggtagaaagctgcggcgtgatggtgtgacgtacatcttccacgcgggcaaatgcagaaatcaccaggctcagcgggctcgtcatttcgcgctcttcgttaccttcctgccagcgggttttcatgctcatggagtctttacccaccgggatcgtcaggcccagcgccggacaaagctcttcgcccacggctttaacggcttcatacaggcccgcatcttcaccagggtggcctgccgccgccatccagttggcggaaagtttgatgcgtttgatatcgccaatttgtgttgcggcgatgttggttaacgcttcaccgaccgccagacgggcagaggcggcgaaatccagcagcgcaaccggcgcacgctcgccaatcgccatcgcttcaccgtagtagctgtcgaggctggcggtagtgaccgcgcagttagcgaccggcacctgccacggccccaccatctgatcgcgcgctaccatgccggttacgctgcggtcgccaatggtcaccaggaaggttttttccgccacagtcggcagatgcagcacacgtttcaccgcgtctgcaatggtgatcccttcacgggccagcgcgtcgcctttcgctttcagcgtttgtacatcgcgggtcatcttcggcgttttaccaagcaggacgtccagcggcagatcgatcggctgattatcaaaatgacgatcgtgcagagaaagatgcagttcttcggtcgcttcaccaatcaccgcgtagggtgcgcgctcacgcttacacagttcgtcaaacagcggtaattgatcggcagcaaccgccagcacgtagcgttcctgggattcgttacaccagatttccagcgggctcatgcccggttcgtcgcttagaatctcgcgcagttcaaatttaccgccgcgcccgccgtcgctcaccagttccggcatggcgttagaaagaccgccagcgccaacgtcgtggataaacaggattgggttggcatcaccaagctgccagcaacggtcgatcacttcctggcagcgacgctccatctccgggttgtcgcgctgtacggaagcaaagtcgaggtcggcatcagactgaccagacgccatagaagacgctgcaccaccgccaagaccgatgttcattgccgggccgccgagaacgaccagcttcgcaccgacgttgatctcgcctttttgtacgtgatcggcgcgaatgttgccgatcccgcccgccagcatgatcggtttgtgataaccgcgcagctcttcgccgttgtggctgttcactttttcttcataagtacggaagtagccgttcagtgccggacgaccaaattcgttgttaaacgccgcgccgcccagcgggccttcggtcatgatgtccagcgcggtgacaatgcgctcaggcttaccgaaatcttcttcccacggctgttcgaagccaggaattcgcaggttggaaacggagaaaccaaccagacccgctttcggctttgcgccgcgcccggtggcaccttcatcgcggatttcaccgccggaaccggtcgccgcgcccggccacggagaaatcgccgtcgggtggttgtgagtttcgactttcatcagaatatgcgccggttcctgatggaaatcgtagcggcccgtttcgtggtcagcaaagtagcggcccacttcagaaccttccattacggcggcgttatctttataagcagagagaacgtgatctggcgtggtttcgaaagtatttttgatcatcttgaacaggcttttcggctgctgttcaccatcgataacccagtcggcgttaaaaattttgtggcggcagtgctcggagttcgcctgggcaaacatatacagttcgatgtcgttcgggttacgaccaagctttgtgaaagcatcctgcagatagtcaatttcatcttccgccagagccaagccaagacgcaggttagcgtcgatcagcgcctgacggccctgccccagcaaatcaacgctggtaaccggagtcggttgatggtgggcaaacaactgctctgcatcatctaaagcaaaaaagaccgtttccatcatgcggtcgtgcagttcagcggtaacctgctgccattgttcattggtcagcgtaccggcttctatatagtaagcaacgccgcgctcaaggcggtttacctgttgtagcccgcagttatgggcaatatcggtcgctttgctagaccagggagagatggtgccaggacgcggggtcaccagcaggagtttgccttgcggggcgtggctggcgagtgccgggccatatttcagcaggcgttcaagttgtgcgtgctcatcatcgtttaacggcgcattgaggtcagcaaaatggacatactcggcgtaaatattgtgaaccgggagcctggcagcctgaaaacgtgccagcagtttgttgattcggaatgcgctcagtgcagggctaccacgcagaatttccatcataagtctctcgtcttctaagctttcggtgtacccaagggggggaaacgggcgtcattataaagaatctgatgcgctgacgaaaccgtttgcgtggaaataaaatcaccatcgtgaattagcaacgcgtgccgccaatggctgtaataagttgccatctggcgcaggtttacgcaaaatgccgctcatttatgagtaaacctttcactattattacgttttttcaagctgggacgcgcacgacacagagaattaactaattgaaaaaattaaagattaattatctgttcatcggcattctggcactgctgctcgcggtcgctctctggccatccattccctggtttggtaaagccgacaaccgtatcgccgccattcaagcgcggggagagttgcgtgtgagcaccattcatactcccctgacttataacgaaatcaacgggaaaccttttggcctggattacgaactggcgaaacagtttgccgattacctcggcgtaaaactgaaagtgaccgtgcggcagaatatcagccagctgtttgacgaccttgataatggtaacgccgacctgctggcggcaggacttgtctataacagtgagcgggtaaaaaattatcagcctggccctacctattattccgtgagtcaacaactggtttataaagtgggtcagtatcgcccacgtacgctgggcaacctgacggcggagcaactcaccgttgcaccgggtcatgtggtggttaacgatctccagaccctgaaagaaacaaaattcccggaattaagctggaaggtagacgacaaaaaaggctctgcggaattaatggaagatgtcatcgaaggaaaactcgattacaccattgctgattctgtcgccatcagcctgtttcagcgcgttcacccggagctcgccgtagcgctcgatatcaccgatgaacaaccggtgacttggtttagcccgttagatggcgataataccctttccgccgccctgctcgacttcttcaacgaaatgaatgaagacggtacgctggcacgcattgaagagaaatacctggggcatggcgatgattttgattacgtcgatacgcgcacatttttacgcgccgtcgatgcggtactgccgcagttaaagcccctgtttgagaaatacgccgaagaaattgactggcgtttgctggccgctattgcttatcaggaaagccactgggatgcacaggccactagtccgacgggtgtgcgcggcatgatgatgttaaccaaaaataccgcgcaaagcctcggcattacggatcgtaccgatgccgaacagagcatcagcggtggcgtgcgttatttgcaggatatgatgagtaaagtgccggaaagtgtgccggagaacgagcggatctggtttgccctcgctgcgtacaatatgggctatgcgcatatgctggatgcccgcgccctgacggcaaaaaccaaagggaatcctgacagttgggctgacgtaaaacagcgtctgcctttacttagccagaaaccctattacagcaagctgacttacggctacgctcgtggacatgaagcctacgcttatgtcgaaaatattcgtaagtatcagattagcctggtgggttatctgcaagagaaagagaagcaggctacagaagcggcgatgcaactggcgcaggattatccggcggtaagccctacggagttgggcaaagagaaatttccttttctcagctttctttcccagagcagtagtaactatttgacccattctccctctctgctgttttccaggaaagggagtgaagagaaacaaaattaatccgtgctggattgcgcttttttctgcgctttaatttcctggcggcgcatgcgaaagaagtcactgagcaacgccgcgcactcatccgccagtattccttccgtaatttccactcggtgattcatacccggatgatgcagcacatccattaaagatcccgcagcgccagttttcgcgtcacgcgcaccaaagaccacgcgaccaatgcgactgtggatcatcgctccggcacacattacacatggttcaagcgtgacatacaacgtggcgtcgatcagacgataattttgcatcaccagaccaccctgccgcagggccatgatttctgcatgtgcggtgggatcatggcgaccaatcgggcggttccagccttcgccgattacccgattgttatgcactaataccgcgccgaccggcacttcccgctcatcccaggcacgtttcgccagcgtcagcgcgtgacgcatccagtattcgtggctaaattcgacttcagacaaaaagaaaactccggttataaaagcgcggcgcattatacacggacgctatgctttactttattccagttgctggagttcaccgcgcggggttactcgccaacgatgctgacagaaataaagcagcggattgtcctgattactgtcgctatagccactgtacagccgcagcggagtgccgattttgcgctccagttgtgcgaccttttcatgtcccagacaacgcatcgtcaatacccaaccaccatagccacgctgaatttggctggcgataagattaacccgcggcagccagggcgtatcgaaataaaccgcttcaaccagcggctgcggagagccggtaatcaaccagatatcagcatcggaacttaacaggtaggtggttaatcgctcctgaaccagcggaaaggcggtaacattgtcgcgaaaccagcgcacgaaatcggcctgcaacgtctgtaaacgtgcttcgctgtgaccaaaagtgcacccccacagaagcagactcatcggccagcgtgccgcacgaccttttatcaataacgcaatggctataatcggtaacaacggcaggacaagtaacgcattcagcggttggcgacgtagtaaatagcgcagaaaactgccgaacatatcctgctgatgcaatgttccatctaagtcaaaaaacaccacacgacgctcgtgagttgccaaaccatactcctctggactgaaacatcctgattaattttcgctactacatagcctaacagatagatcatcacttttccggcaacaatcgaccgcatcatggctaactggaatttttaattcatggcaattagcggcaatggaatataaaattcactcgcgtgtgtctcatattgcctgttgtcgccactatttcatcgcgaggaaagatatgaacggcttacttcgtatccgtcagcgttaccaggggcttgcccagagtgataaaaaactggcggattatctgctgctacaacctgatacggcgcgccatttaagctctcagcaactggccaacgaagccggagtcagtcagtccagcgtcgtgaagttcgcgcaaaaactcggctataaaggttttccggcgcttaagttggcgttgagtgaagcgctggcaagccagccggaaagtccctccgtgcccattcataaccaaatccgcggtgatgatccgttacggctggtcggcgaaaaactgattaaagaaaatactgccgctatgtacgcaacgctaaacgttaatagtgaagagaaactgcatgaatgcgtaacaatgttgcgctctgcgcggcggataattctgaccggtattggcgctagcggtctggtggcgcaaaactttgcctggaagctgatgaagattggcttcaatgctgccgcagtgcgcgatatgcatgcgctactcgcaacagtacaggcgagctcccctgacgatctgttattagccatttcctacaccggtgtacgacgcgagttaaacctggcggcagatgagatgctgcgagtgggcggaaaagtgctggcgattaccggctttactccgaatgccctgcaacagcgtgcttctcattgcctgtataccattgccgaagaacaagcgacaaacagtgctagtatctctgcttgtcacgctcagggaatgttaacggatttgctgttcattgcgctgattcagcaggatctggaactggcaccagaacgtattcgtcatagtgaagcgctggtgaaaaaactggtctgagtaaagaatgcgcgtataatgcccgcccggtttgtgttgttttgagagtttccttatggcgttgttaatcactaaaaaatgcatcaattgtgatatgtgtgaacccgaatgcccgaatgaggcgattagtatgggagatcatatctacgagattaacagcgataagtgtaccgaatgcgtagggcactacgagacaccaacctgccagaaggtgtgcccgatccccaatactattgtgaaagatccggcgcatgtcgagacagaagaacagttgtgggataaatttgtgctgatgcaccacgcggataaaatttaatattctactctggaagtagagtattaattatattactgggaagccttaacgccattatatttatttaattgatgacattagcataatcattcactaagttaatttatatagtatctgcccagacacttatttatagttattaaaggtgcgtccgactggttcaccggacgcaccttaagtacgtttccttgtgttataagaacagaaggatcagctgtaaaacagcaatgatgattttgatgacccgtttaatcaggtatcggcaatcagtcattcgtttttccttaaacaaggaatgcagccattcagattagcccttacatctccccaaaactgaacgtgcgagttattgagggtgcatgctgcactccacaccagagctttgacgacaccactcgtttcaatgggggaattctgtggcatggtgtaaagcacagcaaaatcttcaataacgaagccaattttaatgtacttacgaattggcggtcacgttaatctttccatcaatattgctttcttcgtaaaggctcgagtttttatgctaaagattgcaagttgcttgtaaaagataagtacactgatccataatcgctgttgttgagggtgcatgctgcacaaaattaaagttaaaaagtaaaacccccgttccttaccagttcgggggttttactttttaaagagaacggtattatttttaactttcaataattaccgtggcacaagcatagtgccgctcatctgccagcgttacatgcatatttgcaacgcccagcttttccgccagttttaatgcctcgccccatagccgtagccgtggtttgccgagctcatcattgaatacttcaaattgattaaacgccagaccattgcggatcccggtgccaaacgcttttgctgcggcttctttcacagcaaaacgcttcgccagaaaacgcaccggctggtggtgcgttttccagatagcccattcgttatcgcttaatacgcggcgtgccaggcgatcaccggatcgggcgatcaccgcttcgatgcgagcgatctccacaatatccgtgcctaaacctaatattgccattagccacgcgcttccagcatcagacgcttcatttctgccaccgcatctttcagtccggtcatcactgcacgaccaataatggcatgaccgatattcagttcatgcatctcagggatggcggcaatggctttcacgttgtgataggtcagaccgtgtccggcgttaactttcagaccgaggcttgcggcaaaggtcgcggctttggcgatacgcgccagctcttgcgcctgttcggcgtcagttttggcatcagcatagcaaccggtgtggatctcgataaacggtgcgccaacctctgccgcagctttgatctgctcttcatcggcgtcaataaacagagaaacctgaatcccggcatctgccagacgtttgcaggcatcgcgcattttgtcacgctgccctgcgacatccaggccgccttcggttgttacttcctgacgcttttccggtaccaggcagcaaaaatgtggcttcgtctcaacggcgatcgccagcatctcttcggtcaccgccatctccagattcatgcgggtatccagcgtctgacgcaggatgcgcacgtcgcggtcagtaatgtgacggcgatcttcacgtaaatgcacggtaatgccgtccgctcccgcctgctcggcaataaacgcggcctgcaccggatccgggtaagcggtaccgcgcgcgttgcgcagcgtagcgatatggtcaatgttgacgcctaacagtaattcagccatgacaatcctcatcattcataatgtgttttcaccgttcgcttaggcataaactgccggaacagttccctgctctttaaaggtttaccgccaagatacggcttaagcgccatgcgggtaaagcgtttcgcggcgcgcagtgtgtctgcgtcaggaaattcccgtgcgtttaacgcttttaactgccttccggtgaacgttttattgtcgataacgacgcttgcgataaaccctttttcttcgcgataacgatacgtcatggtgtcatctaccggctcgccgctacccgcacaatgggtaaaattgacgccataacccagatgcccgagcagtgccagttcaaagcggcgcagcgcgggttctggcgtaccagtgacccctgcaagagactgaatgcagtgcaagtaatcgaaaaaaagttcagagaagcgcgtctcgtattccagtacgcgggagagaagttcgttgatgtacagaccgctgtaaagcgtgataccgcttaatggcagcgccaggctgacggcttcagcactgcgcagcgttttgacttcgccacgcccgccaaaacgtagcaagagaggggtgaaaggctgtaatgcacctttcagggtagagcgtttagagcgtgcgcctttggcaaccagacgcacgcgcccgctttcctccgtgaagacgtccagcatcaggctggtttcgctccacgggcgactatgcaggacaaatgcgcgctgccagccttccatcggagttactcttaaagatcgtcaacgtaaccgagactgcgcagtgcgcgttcgtcgtcggcccaaccggatttcacttttacccacagttcaaggtgaacaggcgcttcgaacatttcctgcatgtctttacgcgcttcaatcccgatggttttgatcttggcccctttgttgccaatgaccatcttcttctgcccttcacgctcaacgagaatcaaaccgttgatgtcataaccaccgcgttcgttagagacgaaacgttcgatctccacggtcacggagtacggcagttcagcgccgaggaaacgcatcagtttttcgcggatgatttcagacgccataaaacgctgactgcgatcggtgatgtaatcttccgggaagtgatgagtcgcttcaggtagatgcttacgcacgattgccgcaatagtgtcaacattcagcccggtttcggcagagattggcacgatatcgaggaagttcatctggcttgccaggaactgcaggtgcggcagcagatcggctttctcctgcacgttgtccactttgttcaccgcgaggattaccggcgctttgccttcgcgcagtttgttgagcaccatttcgtcgtccggcgtccagcgggtgccttcaacgacaaaaatcaccagctcaacatcgccaatagagctgctcgccgctttgttcatcaggcggttaatggcgcgtttttcttccatatgcaggcccggtgtatcgacgtagatcgcctgatacgcgccttcagtatggatccccacaatgcggtgacgagttgtctgcgccttgcgggaagtgatggagattttctgccccagcagtttgttcaacaatgtggatttgccaacgttcggacgtccgacgatggcaataaatccgcagtaacttttatcgatgctcattccagctccagttttttcaacgcctgttcggcggcagcctgctcagccttacgacggctactacctgtgccaaccaccggttcactcaggccgctgacctggcagtggatagtaaattcctgatcgtgcgcttcgccacgtacctggactaccagataagtcggcagcggcagatggcgaccctgcaaatattcttgcaagcgcgttttcggatctttttgtttatcgcctgggctaatttcgtccaaacgagtttgataccagttgaggattaatttctcgacggtttgaatatcactgtcgaggaatacgccaccaattaatgcttcgacggtgtcggcgagaatactctcacgacgaaatccaccgcttttaagttcacctggccctaaacgtaagcactcgcctaactcaaattcgcgcgccagttccgccagcgtattgccacggaccagcgtggcgcgcatccggctcatatcgccttcatccacacgagggaaacggtgataaagcgcattggcgataacgtagctcagaatagagtcgcctaaaaattctaaacgctcgttatgtttactgctggcactacgatgagttaatgcctgctgcaacagttcctgatgattaaaagtgtagcccagcttccgttgaagccgattaattacgatggggttcatgcgataccaataaataaatgcgtcaacaattcagcacacgaaacagacctgatatacatggttctgctaactgcttcgctgcagtttcagtttaccggtatatggggaccaacgctgtttcgtgtgccgtggcaacctggaggtgccaaccttaaacttcgggggaatattctatacacaacgacgggggatgtcgttagccacgggagatttatctcataaataattcacgttgtcgccataacggcgacaacgtgaacgaagatggctattaatggatgccgccaatgcgacttaagcgcagaccagtcggccattcgccttcttgcttatcgaagctcatccagatagccgttgcccgaccgaccagattcgcttccggcacaaagccccagtaacggctgtccgcgctgttgtcgcggttgtcgcccatcatgaagtattgtcccggaggaacaatccaggttgccagttgttgccctggctgctggtaatacatccccacctgatcctgcgcaatcggcactgtcagaatgcggtgcgtcacatcacccagtgtctctttacgctcggaaagacgaattccattttctttggtttcgtttttcggcacttcaaagaatccgctggtcgcttccccaccattacggcgactgaaggtctgaacgaaatcgctcggttccacgttactgtaggtgaccggcagcgcgttttcacacgcctggccggaactgcatcccggttgaatcgtcagctctttactgaccggatcgtaagtgactttatcgcccggtaaacccaccgcgcgcttgatgtaatcaagctttggatcttccggatatttaaagaccacgatatcgccgcgtttcggatgaccggtttcgatcagcgttttctggtagataggatctttaatgccataagcaaacttctctaccagaataaaatcaccaattaacagagtcggcatcatgctaccactcgggatctggaacggttcataaataaagctacgcacaatcaatacgatagccagtaccggaaaaacagaagcaccggtttccagccagccaggcttcggcgcaacctttttcaacgttgctttatccagactgtccccggcagccgcctgcgccgctgcctgacgttcccgccgtttaggtgcgaaaaagaatttatccacgcaccataaaatgcccgtcaccagtgtggcaatcaccagaatcagggcaaacatattcgccatgccaactcctaagggttatttgttgtctttgccgacgtgcagaatggcgaggaacgcttcctgcggcagctcgacgttaccgatctgcttcatgcgtttcttaccttctttctgcttctgcagcagctttttcttacggctgatatcgccgccataacatttagccagtacgtttttacgcagctgtttcacggtggatcgcgcaatgatgtgcgtaccaatcgctgcctgaatggcgatatcaaactgctggcgtgggatcagatctttcatcttctccaccaactcgcgaccgcggttttggctattatcacggtgggtgatcaacgccagcgcatcaacacgttcaccgttgattaatacgtctacacgtaccatgtcggacgcctggaagcgcttgaagttgtaatccagagacgcataaccacggctggtagatttcaggcgatcgaagaagtcgagcaccacttccgccatcgggatctcgtacgtcagcgccacctgattaccgtggtaaaccatattggtctgcacgccgcgtttttctacgcacaacgtaataacgttgccgagatatgcctgcggcagcagcatgtgacactctgcaatcggctcgcgcagttcgtagatgttatttaccgcaggcagcttggatgggctgtcgacgtagataacttctctactcgtggtttcaacttcatacactacggtcggcgcagtggtgatcagatccagatcgtattcacgttccagacgttcctggatgatctccatgtgcagcaggccgaggaagccgcagcggaaaccaaagcccagcgcgctggagctttccggctcatagaacagactggcatcgttcaggctgagtttacccagcgcgtcacggaaggcttcatagtcgtcggaacttaccgggaacagaccggcgtatacctgcggtttgactttcttaaagccaggcagcgccttttctgccggattacgcgccagcgttaaggtatcgccgactggagcgccgtggatatctttaatcgcacatacgagccagcctacttcgccacatttcagttcagtgcggtcaacctgtttcggcgtgaagatgcccagacggtcggcgttataggtctgcccggtactcatgactttcactttgtcgcccttacgcagggtgccgtttttaatacggataagactaacaacgcccaggtagttgtcgaaccaactgtcgataattagtgcctgcaacgggccttccggatcgccttccggcggcggaatgtcgcgcaccagacgttcgagaacgtcctgcacaccaacgccggttttcgcactacagcgcaccgcgtcggtggcgtcgatgccgacgatatcttcaatttcttccgccacgcgttcaggatcggctgccggcaggtcaatcttgttcagtaccggcacaacttcgagatccatttccatggcggtgtagcagtttgccagggtttgcgcttctacgccctgcccggcgtcgaccaccagcaatgcaccttcacaggcagccaggctacgggaaacttcataggagaagtctacgtggcccggggtgtcgataaagttaagctgataggtttcgccgtcagacgctttgtagtccagcgtcacgctttgcgctttgatggtaatgccacgctcacgctcaagatccatggaatcgagaacctgcgcctccatttcacggtcagacaggccaccgcagatctggataatacggtcagacagcgtgcttttaccgtggtcaatgtgagctatgatgctaaagttacgtatattcttcataaagtatgattattgtgccttaatgcccggttaaccaggcttttagaagtcgctgttctgagcttaacgtctgtattaatagaaacgccgcattctacactacaacattgaggcgaggaaatgttcataccgtatggattgtggtatctggaaacgtcctcgcatttgttatgcaaaatgcaacaaagccagtgaaatcactggctcgcgtcttcgctagatgtttcaaatcgcacaaggccaggcggcaatgccacgcttaagatgatcggttgccattctgcccgggcagcaaacttacggctgtagccgcgcgcaatcaggaacccgccaataccaccgaggatcgcaccacataatgctgcgacgtcagaagcaaagagtagctgaaataggctagcgataaggaataatcccaccagcgggctcatataaaccagtaatgcggagctaagcaggctgccttcggcgatccccaattccactttttgccccggcactaacggctcatcacagggtacgacaatggtatgcgtggtttgcgggccaagtttatttaacacgcggctaccgcaaccggcgcgactagcgcagctgctgcaactagctttaacatcacaactgaccagcgcctgcccgttttgccaggagacgacggtagcccactctttgatcattgcgctgccccgaacttaatattctcggcaatgcgtttcgccgtttgcggcggcagttcaccgacaatggtgatttcggcgttatcacgtacgcttgtactgacggttctgcgtccggtgcgcaacatctgatcggtgctgcttggcgtagcgcggttaacgtttacgctgaagctgaataatccgtcggaatagagacgactttcgataggcatgttgtccatcgtcggtagcggacgtcgactactggaaacttcgctaaaaccctgtggcaaccaggttggcgtccagctgaatttagctttttcacctacaggaacagaaagcaacggcggcaaatttgccttcgccagcgtctgcatactgctgctgatatcctgattgacgttaaaagcaatcacgcgaaattgttccagcgtttcaccatcgcgatcaaggagatcaacccgcatcggtaatttgctttcggtgtccatccacacgatgtagctgtagcgtgtaccatctcgggcaaccacgcgaatgacttcgcaaagacgatcagcaatacgcgtgcgcccgacggagataaagtcgtagtaaggagaaaggcgtttgaaatcggtatagataaggcttggcagagaatcaacaatgtaatcgccattaagcgtgaacggttcaagtcccggttcaaaatagctgatttcattgccgcgctgtaccacttcccggcgcgggccatccatttgcaacaattgtgcaagaggacggttatcgaggcgtgcatgtcgataacgcagagactcaacaccctgtttattgatgctgatgaaactcagctcgtaattcagactctgactggccaggttcatctgctgtaataacgccccggacgcgggagtggcgctggcgttagcagagaataacaggctacctgtcactaaactcatggcaaaccaaagttgcttcattactggctttgcgttcctaaagtttgaattcctggcacctgtacagcggcttgctgggtttgcgcctgctcaaactgaagctgttcagagtggagtcggcgttgcagttcgtaatcctgcaacattgcattaatgcgacgacgctgctcctgtacctgctgctgttgaccattgtttgcggtcgcttcagaaggtactcccaggcttaccgggctggctttacccatcatcggcagtgtattaaataccggcgtttcgggctgctgggacgtttcagattgtccattatagtgctggacgccaacgataactgcaaggcttacgcatgcggctacgcccatttgggtaagctgtgccgcccacggacgtactttctgccagaatggcattttctgccattgatgcggcgcaggctgggcttccgggatcaatgtcgccggttgacgtactggctcttcttcaatggcggccatcacgcgactagagatatcgaaatggagcacctcgggagtatcaccccgcatactgtcacggattaagtgatagctttcccaggttttctgcatttctgggttatgagccagttcgttaagcagctcactatccagcgtttcgccatccattaaagcggaaagttgttctttctgcatgcctaatacccttatccagtatcccgctatcgtcaacgcctgataagcggttgaactttgttatcaatagcttccctcgctcggaagatacgactacgcaccgtacctaccggacaatccatgatagcggctatctcttcatagctcaggccatccagctcccgcaaggttattgccatgcgtaaatcttccgggagggactcaatagttcggaaaactatctgtctcagttcttcactcaacattaagttctcagggttgctaatttctttcaacgcgccgccactttcgaagttttcagcttcaatggcatccacatcactggaaggtggacgacgcccctgagcaaccaggtaatttttcgctgtatttacagcaatccgatacagccatgtataaaaagcgctatctccccggaagctatccagcgcacgataggctttaataaaagcttcttgtaccacatcgggaacatcaccgctcggcacatagcgggaaaccagactcgccactttatgctgatagcgcactaccagtaagttaaaggctttctgatctcccttctggacccgttcaaccaggacctggtccgttaactgctcgctcatccgaggtaaagtctccccaaaccaaatttccacgcgctatcgaaacgccactccattagctgcaatttgagcaagcaaagggttagagtgtctcgtttttgtaaagttccgtaacgcatctgtttttgtttgtcatgctgtagacggatcattatctatcattataagtctacagaatctgaacatcgcattatctgtgtagaaatgcccatttaactgcctgaagagtaacccaacggcctttttatttcaccacctaatcctccaccagccagtaacttctctttttctcgccgccctgcgtcagcgtgtttagcaactgtaacaaatattaaaatagcaggtgtttatccgcacaacatgatgctatgctgaccaaaccatgtttagtaaattaaacaaagaaaatgaatactctccctgaacatagttgtgacgtgttgattatcggtagcggcgcagccggacttagtctggcgctacgcctggctgaccagcatcaggtcatcgttctaagtaaaggcccggtaacggaaggtagtacattttatgcccagggcggtattgccgccgtgtttgatgaaactgacagcattgacagccatgtggaagacacattgattgccggggctggtatttgcgatcgccatgcagttgaatttgtcgccagcaatgcacgatcctgtgtgcaatggctaatcgaccagggggtgttgtttgatacccacattcaaccgaatggcgaagaaagttaccatctgacccgtgaaggtggacatagtcaccgtcgtattcttcatgccgccgacgccaccggtagagaagtagaaaccacgctggtgagcaaggcgctgaaccatccgaatattcgcgtgctggagcgcagcaacgcggttgatctgattgtttctgacaaaattggcctgccgggcacgcgacgggttgttggcgcgtgggtatggaaccgtaataaagaaacggtggaaacctgccacgcaaaagcggtggtgctggcaaccggcggtgcgagcaaggtttatcagtacaccaccaatccggatatttcttctggcgatggcattgctatggcgtggcgcgcaggctgccgggttgccaatctcgaatttaatcagttccaccctaccgcgctatatcacccacaggcacgcaatttcctgttaacagaagcactgcgcggcgaaggcgcttatctcaagcgcccggatggtacgcgttttatgcccgattttgatgagcgcggcgaactggccccgcgcgatattgtcgcccgcgccattgaccatgaaatgaaacgcctcggcgcagattgtatgttccttgatatcagccataagcccgccgattttattcgccagcatttcccgatgatttatgaaaagctgctcgggctggggattgatctcacacaagaaccggtaccgattgtgcctgctgcacattatacctgcggtggtgtaatggttgatgatcatgggcgtacggacgtcgagggcttgtatgccattggcgaggtgagttataccggcttacacggcgctaaccgcatggccagcaatagtttgctggagtgtctggtctatggctggagcgcggcggaagatatcaccagacgtatgccttatgcccacgacatcagtacgttaccgccgtgggatgaaagccgcgttgagaaccctgacgaacgggtagtaattcagcataactggcacgagctacgtctgtttatgtgggattacgttggcattgtgcgcacaacgaagcgcctggaacgcgccctgcggcggataaccatgctccaacaagaaatagacgaatattacgcccatttccgcgtcagtaataatttgctggagctgcgtaatctggtacaggttgccgagttgattgttcgctgtgcaatgatgcgtaaagagagtcgggggttgcatttcacgctggattatccggaactgctcacccattccggtccgagcatcctttcccccggcaatcattacataaacagataaaaagcctgggtcagcgccgtatacgcttcggaatagttctggtctggcccacgaatgactaagcgatcgctaaagcattctcccgcctgcggggagaatgccagcagcacccgatgcggcagtcgcgcttcgttttccgccacatccgtccgcaaacgtaaatgccagcccatgcttaatgccagctccgtaaaaccattaccaatctgctctggcagcactacgcagaaaaatccctcttcggtaatgcactccgccgcacaggtcagcaagcttgggtgatcaagcgtagtggtatagcgagcctgttcccgttgaggtgtgctgcactctactccctgctgatagtaaggtgggttactgatgattaaatcgaagcgtactgtctgctgtgtgatccactgctgaatatccgccgtatggacgttaatccgctctgcccacggggactggttgatattttcctgcgcctgcgcggcagcttcactttccagttcaactgcatcaatcatcacgctgtcatcggttcgctgcgccagcattaatgccagcaacccgctacccgcgccgatatcaaggcaacgttttaccccagccaccggtgcccatgcgcccaataaaataccatccgttcccactttcatcgcacagcgatcgtgagcaacaaaaaactgtttaaaagtaaatccattacgacgaagcacggatgtagactgactcatgaaaataaaaccttgcaggaaaaacggcgatagcaccgggtgagaacaatacccgagaagcgatatccatacaaacagatgaagattgcagccgtaacgtctataatcagcgccccacacagaggtagaacatgactgtaacgactttttccgaacttgaactcgacgaaagcctgctggaagccctccaggataaaggtttcactcgcccgaccgccattcaggctgccgccattccgcctgcgctcgatggccgtgatgtactcggttctgcgccgacaggcaccggtaaaacggcggcgtatctgctgccagcgttgcagcacctgctcgatttcccgcgtaagaaatccggtccgccgcgtattttgatcctcaccccaactcgcgagctggcgatgcaggtgtccgatcatgcccgcgaactggcgaaacatacgcatctggatatcgccaccatcaccggcggcgtagcctatatgaaccacgcggaagtgttcagcgaaaatcaggacatcgtggtcgccacgaccggacgtctgctgcaatacataaaagaagagaacttcgattgccgcgcggttgaaacgctgatcctcgacgaagcagaccgtatgctggatatgggcttcgctcaggatatcgaacatattgctggcgaaacgcgctggcgtaaacagaccctgctctttagcgcaacgctggaaggcgatgcgattcaggactttgccgagcgtctgctggaagatccggtggaagtttctgccaatccctccacccgtgagcgcaaaaaaattcatcagtggtattaccgcgccgatgatcttgagcataaaaccgcgttgctggtgcatctgttaaaacagccggaagcgacccgcagtattgtgtttgtgcgtaagcgtgagcgtgtgcatgagctggcaaactggctgcgcgaagcgggcatcaacaactgctatctcgaaggtgagatggtacagggcaagcgtaacgaagcgatcaagcgtttgaccgaaggtcgcgtaaacgtactggtcgcaaccgatgttgccgcgcgcggtatcgacattcctgacgtcagccacgtctttaacttcgatatgccgcgcagtggcgatacttatttgcaccgtatcggacgtaccgcgcgcgccggtcgtaaaggcaccgcaattagcctggtggaagcccatgaccatctgctgctgggtaaagtaggccgctatattgaagagccaattaaagctcgcgttattgatgagttacgcccgaaaacgcgtgcgccaagcgaaaagcagaccggcaagccaagcaagaaagtactggctaaacgtgctgagaagaaaaaagctaaagagaaagagaagccgcgggtgaaaaaacgccatcgcgacaccaaaaatattggtaagcgccgtaaaccaagcggaacgggcgtgccaccgcaaacgacagaagagtaatctcaatgccaggtttaagcctggtattaaaagtgctggcaaacgcaaaactgcctgatgcgctacgcttatcaggcctacgtggctcatgcaatatattgaatttgcacgatcttgtaggccggataaggcgttcacgccgcatccggcatgaataaagcgcactttgtcgacaagttaaatgccgggtttaatcccgacattatttttatccagccacaaaactctcttcaacacactgaataaaagtgtgcatcgccgggctaaccgcttttccagcatgatgtgcgcacatggccgtaatggtctggctctgttcgccaaaaggcaattcaattaattctccgcactccaactcttttgccaccgcaaagcgcggtaggtagctgaccccgatattcgccgcgacacaacgcttgatgctttcgatacttataagctcaatggtgttttccaccgtgatccgccgctgacgcagcgtgctctcaaatatctgccggaagacacattgcggttcgttgataataaagctacaggcgttatgtcttcccggctcagtaaaatcgacatctgcaatttgcggactagccaccagcaccagactttgttcacccaactctcgtcgattcagagcatcatcattccctacacgataaaagacgccaacatcggcctcatcattcagtagcgcatcacggatcacgtaacagttcaggctctgcaagcttaaacgcacttttggggcgcgttgccgaaaacgctgcaacacctgcggcattcggtaagagagcaacgtttcgccgctaacaacgcgtagttccccgtccggatcactctcctttttggcagcctcacgaagcgtatccatcactcgggtaagttcataaatgtgcggcagcaacttttttccttcgcgggtaaggcacatccgtcggccaattttctcaaataactggacactaaactcctgctcaagctgctgaatatgaaaagtcaccgtgctttgtgtacagcacaatttttggctagctcgcaaaaaggaaccctcttccaccacggttttaagcgtaataaaacggcgcagatccataaccccaaacctatcgaaaatatcgaatctagaatataaaaacattcatttttttaaatgttccgtgtcgggtactgtctaccaaaacagaggagataacaagtgacaccgacccttttaagtgctttttggacttacaccctgattaccgctatgacgccaggaccgaacaatattctcgcccttagctctgctacgagccatggatttcgtcaaagtacccgcgtgctggcagggatgagtctgggatttttgattgtgatgttactgtgtgcgggcattagttttagtctggcagtgattgacccggcagcggtacaccttttgagttgggcgggggcggcatatattgtctggctggcgtggaaaatcgccaccagcccaacaaaggaagacggacttcaggcaaaaccaatcagcttttgggccagctttgctttgcagtttgtgaacgtcaaaatcattttgtacggtgttacggcactgagcacgtttgttctgccgcaaacacaggcgttaagctgggtagttggcgtcagcgttttgctggcgatgattgggacgtttggcaatgtgtgctgggcgctggcggggcatctgtttcagcgattgtttcgccagtatggtcgccagttaaatatcgtgcttgccctgttgctggtctattgcgcggtacgcattttctattaacgaaaaaaagcggaagaggtcgccctcttccgcttagtaacttgctacttaagccttacaggctttcagtaaaggtacgagcgataacgtcgcgctgctgttccggagtcagagagttaaagcgaactgcataaccggatacacggatggtcagctgcggatatttttccggatgcttaactgcatcttccagagtttcgcgacgcagaacgttaacgttcaggtgttgaccaccttcaacgcgaacttctggtttcacttctactggaacttcacggtattcaatgtcacccagtttgcttactgcaaccacttcatcttctgcataacctgcttttgcaacgatgcaacgcgcttcgcctttttcgctgtccagcagccagaaagagttcagcagatcgtcgttagcggctttagtaatctggatacctgtaatcatgtgatgcctccccggcaaaattatttgatttgttcagcctgtcgcggccaattggtaaaaccattgttgcttgagtgtatatatactcctcaaacacccttgaatctttgatttaaatcaataaaaaccacacatcaagtatggtcgcaaatggattttattgttttacatcaacttatgcgggtgtgaaattttaccaatttacatttttttgcactcgtttaagtctaaaaaatgagcatgattttgttctgtagaaagaagcagttaagctaggcggattgaagattcgcaggagagcgagatggctaacgaattaacctggcatgacgtgctggctgaagagaagcagcaaccctattttcttaatacccttcagaccgtcgccagcgagcggcagtccggcgtcactatctacccaccacaaaaagatgtctttaacgcgttccgctttacagagttgggtgacgttaaagtggtgattctcggccaggatccttatcacggaccgggacaggcgcatggtctggcattttccgttcgtcccggcattgccattcctccgagtttattgaatatgtataaagagctggaaaatactattccgggcttcacccgccctaatcatggttatcttgaaagctgggcgcgtcagggcgttctgctactcaatactgtgttgacggtacgcgcaggtcaggcgcattcccacgccagcctcggctgggaaaccttcaccgataaagtgatcagcctgattaaccagcatcgcgaaggcgtggtgtttttgttgtggggaagccatgcgcaaaagaaaggggcgattatagataagcaacgccatcatgtactgaaagcaccgcatccgagcccgcttagcgcgcatcgtggattctttggctgcaaccattttgtgctggcaaatcagtggctggaacaacgtggcgagacgccgattgactggatgccagtattaccggcagagagtgagtaaatttgcggggaaatgccggatggcagagttgccacccggctgatttatcaggctttattctgacgccaccattcaccaagcaaaacgccggttgcgacagagatattcagcccggcaacgttgcccgtaccgtcaatcttcacgcgcagatcgttcggatcgcgtgcggcatccggtaacccttcatattcctgacccagcaccagtaccattttcgctggcagactagttttgaacagcggtttaccctgctcgctggaagtggtcactacggtgtaacctgcctgacggaaatcatccagcacgttaacaatgttgtcgccagtaatcggctgaacgtgctctgcgccgccttctgcggtacggatagccgccccgctctccagcagtgccgcatcctgcaccacgacacctttcacgccgaagtgcgcgcagctgcgcatcatgccacccaggttatgcgggttagattcgttttccagtgccagaacgcaatcctgcgcgcctgcctggcttacccactgctgcacggttgtaccgttacgctttttgatcaagaagcaaacgccgccgtgatgttccgtgccactcgcttttgtcaattccgcttcatccaccacatggtacgctttgcggtttgctgccatccagcgcaaagcttctttaaaacgcggcgttacactctggataaaccaggcgcgaacaatcgcttccggacggctctggaaaagtgcctgacatgcattttcgccgtagacgcgggtttcttccgcacgctgacgacgcaacacttccggatcaataaaacttttaccactgatgccaccgtgatcggccttttccggcgtctcatcacccggcgcgcgggaaaccgtgcgccacgggctatcttcccacttgcggtcacggggctgactctgtttgtcatcgcgggcggggcgacggccaccgtcagcacgagattttcctggacgcccgccccctttcccggtacgcgggttgtgggtacgtttatcagaatcatcatcactgcggacatacatcactttgaccttgccgcttttacctttcatttcatcgttcatgcttttctccaccagcgctgcgcgaagcgcgcagattacccgaagtccgcgcggttcgccatgatttcgtaccaaagcctgcgactatcatacctattgaataaaacagattgttgtctggaacaatgtccccgataatatgtaacatattagaaacataccggcgtcgttgccgataagtctccttactcatcccgaggttagttatgaataccgtttgtacccattgtcaggccatcaatcgcattcccgacgatcggatcgaagatgcggcaaaatgcggacgctgcggtcacgacttgtttgacggagaggtgattaatgcgaccggtgaaacactcgacaaattgctgaaggatgatctacctgtggtgatcgacttctgggcaccgtggtgcggcccctgccgtaatttcgcaccaatttttgaagatgtcgcgcaagagcgtagcggtaaagtgcgctttgtgaaagtgaataccgaagctgaacgtgaattgagcagtcgctttggaattcgtagtataccgacgatcatgattttcaaaaacggtcaggttgtcgacatgcttaatggcgcagtaccgaaagcgccgttcgatagctggctgaacgaatctctttaatcttaccggggcgcatcttgtgccccgttttctcctctgcgacaatggcgttttttcgacgctctcttatgaccgaaaacgctgttctccagttacgcgccgagcgtattgcgcgcgcaacacgtccttttcttgcccgcggtaatcgcgttcgtcgctgccaacgctgtcttttgccagagaaattatgtctctgtagcacaattaccccagcacaagcaaaaagtcgcttctgtttgctgatgttcgacaccgagccaatgaagcccagtaataccgggcgtctcattgctgatattttgcctgataccgttgcgtttcaatggagccgtaccgaacccagccaggatttgctggagttggtgcaaaacccggactatcagccaatggtggtctttcccgctagctatgctgatgagcaacgggaagtgatcttcacaccacctgccggtaagccaccgctgtttatcatgctcgatggtacctggccggaagctcgcaagatgtttcgtaaaagtccgtatctggataatcttcccgtcatttccgtcgatctttcccggctttctgcctatcgcctgcgtgaagcccaggctgaaggccaatattgtactgccgaggtagccatcgcactgttagatatggccggcgataccggggcggcggcagggttaggcgagcattttacccgctttaaaacacgctatctggcaggaaaaacgcaacatctgggtagcatcacagcagaacagttagaaagcgtttaaaatcattcggtcacttctgcgggagaccggtatgagtcagcgaggactggaagcactactgcgaccaaaaagcatagcggtaattggcgcgagcatgaaacccaatcgcgcaggttacctgatgatgcgtaacctgctggcgggaggctttaacggaccggtactcccggtgacgccagcctggaaagcggtgttgggtgtgttggcctggccggatattgccagcttgccctttacacccgaccttgcggttttatgtaccaatgccagccgtaatcttgctcttctggaagagctcggcgagaaaggctgtaaaacctgcattattctttccgccccggcaagccaacacgaagatctccgcgcctgcgccctgcgccataacatgcgcctgcttggaccaaacagtctgggtttactggctccctggcaaggtctgaatgccagctttagccctgtgccgattaaacgcggcaagctggcgtttattagccaaagcgctgccgtctccaacaccatcctcgactgggcgcaacagcgtaagatgggcttttcctactttattgcgctcggcgacagcctggatatcgacgttgatgaattgcttgactatctggcacgcgacagtaaaaccagcgccatcctgctctatctcgaacagttaagcgacgcgcgacgctttgttagcgcggcccgtagtgccagccgtaataaaccgattctggtgattaaaagcggacgtagcccggcggcacagcgactgctcaacacgacggcaggaatggacccggcatgggatgcggctattcagcgtgccggtttgttgcgggtacaggacacccacgagctgtttagcgcggtggaaacccttagccatatgcgcccgctacgtggcgaccggctgatgattatcagcaacggtgctgcgcctgccgcgctggcgctggatgccttatggagtcgcaatggcaagctggcaacgctaagcgaagaaacctgccagaaactgcgcgatgcactgccagaacatgtggcaatatctaacccgctcgatctacgcgatgacgccagcagtgagcactatattaaaacgctggatattctgctccacagccaggattttgacgcgctgatggttattcatagccccagcgccgctgctcccgcaacagaaagcgcgcaagtattaattgaagcggtaaagcatcatccccgcagcaaatatgtctctttgctgacgaactggtgcggcgagcactccagccaagaggcacgacgtttattcagcgaagccgggctgccgacctaccgtaccccggaaggaaccatcactgcttttatgcatatggtggagtaccggcgtaatcagaagcaactacgcgaaacgccggcgttgcccagcaatctgacttccaataccgcagaagcgcatcttctgttgcaacaggcgattgccgaaggggctacgagcctcgatacccatgaagttcagcccatcctgcaagcgtatggcatgaacacgctccctacctggattgccagcgatagcaccgaagcggtgcatattgccgaacagattggttatccggtggcgctgaaattgcgtagcccggatattccacataaaagcgaagttcagggcgtcatgctttacctgcgtacagccaatgaagtccagcaagcggcgaacgctattttcgatcgcgtaaaaatggcctggccacaggcgcgggtccacggcctgttggtgcaaagtatggctaaccgtgctggcgctcaggagttgcgggttgtggttgagcacgatccggttttcgggccgttgatcatgctgggtgaaggcggtgtggagtggcgtcctgaagatcaagccgtcgtcgcactgccgccgctgaacatgaacctggcccgctatctggttattcaggggatcaaaagtaaaaagattcgtgcgcgcagtgcgctacgcccattggatgttgcaggcttgagccagcttctggtgcaggtttccaacttgattgtcgattgcccggaaattcagcgtctggatattcatcctttgctggcttctggcagtgaatttaccgcgctggatgtcacgctggatatcagcccgtttgaaggcgataacgagagtcggctggcagtgcgcccttatccgcatcagctggaagaatgggtagaattgaaaaacggtgaacgctgcttgttccgcccgattttgccagaagatgagccacaacttcagcaattcattagccgagtcaccaaagaagatctttattaccgctactttagcgagatcaacgaatttacccatgaagatttagccaacatgacacagatcgactacgatcgggaaatggcgtttgtagcggtacgacgtattgatcaaacggaagagatcctcggcgtcacgcgtgcgatttccgatcctgataacatcgatgccgaatttgctgtactggttcgcagcgatctcaaagggttaggcttaggtcgacgcttaatggaaaagttgattacctatacgcgagatcacggactacaacgtctgaatggtattacgatgccaaacaatcgtggcatggtggcgctagcccgcaagctcgggtttaacgttgatatccagctcgaagaggggatcgttgggcttacgctaaatcttgcccagcgcgaggaaagttgagtaaggtactggaaatgttgaccacttaatcgggactggtgttattattgcccgcttatgtcgtctgcattgcacagaggacccttcaatgaacagagaagaaatgcactgtgatgttgagtaaatttaagcgtaataaacatcaacaacaccttgcccaactacccaagatttctcaaagtgttgatgatgtcgatttcttttacgctcccgccgacttccgggagacgctgctggaaaaaatagccagcgcgaagcagcgcatttgcattgtcgccctgtatctcgaacaggatgacggtggcaaaggcattctgaacgcgttgtatgaggctaaaaggcagcgtccggaactggatgtgcgggtgctggtcgactggcatcgtgcacaacgtggacgcattggcgctgcggcatctaacactaacgctgactggtactgccgcatggcgcaggaaaatccgggcgtagatgttccggtttatggcgttccaatcaatactcgtgaagcccttggtgttctgcactttaaaggctttatcatcgacgatagcgtactttatagcggtgccagcctgaacgatgtttacctgcatcagcacgataaatatcgctacgaccgttatcatctgatccgtaaccgtaagatgagtgacattatgtttgaatgggttacacagaatattatgaatggccgcggcgttaatcgtctggatgatgttaatcggccaaaaagcccggaaatcaagaacgatattcgtctgttccgccaggagctgcgtgatgccgcttatcatttccagggcgatgccgacaacgatcagctttctgtaacgccgctagtggggctggggaaaagcagtctgttgaacaagaccattttccatcttatgccttgtgccgagcagaaactaaccatctgtacgccatacttcaacctgccagcaatccttgtgcgcaatattatccagttgctgcgcgaagggaaaaaggtcgaaattattgttggtgataaaaccgcgaatgacttctacattccggaagatgaacctttcaagataattggcgcattgccttatctctatgagatcaatctgcgtcgtttcctgagccgtttgcagtattacgtcaatactgaccagctagtggttcggttatggaaagatgacgacaacacctatcacctgaaagggatgtgggttgatgataagtggatgttgatcaccggtaataacctgaacccgcgcgcctggcgtctggatctggaaaacgccattttgatccacgatccgcaacttgagctggcgccacagcgagagaaagaactggagctgatccgcgagcataccaccatcgttaagcactatcgcgatctgcaaagtattgccgattatccggtgaaggttcgtaaactcatccgccgtttgcgccgtatccgcatcgaccgattaattagccgcatcctgtaatcacaaccccgtcctgtacggggtttgttttttggaggccacgttttgcgtattctttttgtctgttcgctattgttactttctggatgcagccatatggctaacgatagctggagcgggcaggataaagctcaacactttatcgccagcgcgatgctttccgccgccggaaatgaatatagtcagcatcaggggatgagccgggatcgcagtgccatgtttggattgatgttctctgtcagtttgggggcgagtaaagagctttgggatagccgccccgaagggagcggctggagctggaaggatttggcctgggatgtcgccggtgcaagcaccggctataccgtctggcaactgacccgtcattaaagacgcatccccttccctttgcgatgtagcatcaaagaaaccagaaacgccaccacggccatcaaggtcacataccagaagaaggctgtttccattcctatacttttcaggctcaacgctacgtactccgcgctaccaccaaatatagcattagcgaccgcataactcagaccaacgcctaatgcgcgaacctgtgccgggaacatctcagccttcagtattccactgatacttgtataaaaactcactatcagcagggcacacatcaccagaccaaaagcggcataagggctggaaacgttttgcaatgcactgagaataggaacggtaaaaatggctgccaggctaccgaaacataacatactggtacggcgaccaatcttatcgctcagcgcgccaatgagtggttgaataagcatgaatacaaacaatgcggcagtcataatgccactcgccacgttggcatgcattcccgcagtatttaccagatacttctgcatataagtagtgaaggtatagaaacaaagggagcccgcagcggtaaaaccgagaaccatgatgaatgcacggcgattgcgccataatcctttcagagatccagcttcttttaaagcgcgcgtttcttgttggctagtttcatctaactgacgacgtaaccacaacgccacaacagctaacacagctcctaacgcgaaaggaatacgccatccccactctctgagtgcagcgtcttccatggtgtgttgtaaaaccacgacaaccagtagggctagcagttgtccgccgatcaacgtcacatactgaaaacttgcgtaaaaacctttgcgcccttcaacggcaacttcactcatataggtggcgctggtgccatattctccgccaacagataatccctgaaataaacgagcgagaagcaataatgccggagcccacgtacctatagtttcataacctgggaggcaggcgataaccaggcttccgaaacacatcatacacacgcttaacagcatgctttttttgcgaccatgtttatcggctatgcggccaaatagccaaccgcctattgggcgcatcaggaatcccgcagcaaaaacacctgctgtttgtagtagttgagtcgtcgtgttcccggaagggaagaagatgtgggcaaagtagagactacagaagctgtagacatagaaatcgaaccactcgaccagattaccactagaggcccccacaatcgcccaaatgcggcgacgagtatcactacttgtcagtttgctgtctgccgttacagtactttcagccatgccattatgtctcctgccgtaatccgatgcttttgtcggtcgcttttgtttattttttttgtaaaggaaatattatacatttgttgcatatcattatgcaaccttaaccatgaatttagttagcaggaaaatggttattgaggagcttaaggataaatttctggtaaggaggacacgtatggaagtgggcaagttggggaagccgtatccgttgctgaatctggcatatgtgggagtataagacgcgcagcgtcgcatcaggcatttttttctgcgccaatgcaaaaaggccatccgtcaggatggcctttcgcataatttgatgcctggcagttccctactctcgcatggggagaccccacactaccatcggcgctacggcgtttcacttctgagttcggcatggggtcaggtgggaccaccgcgctacggccgccaggcaaattctgttttatcagaccgcttctgcgttctgatttaatctgtatcaggctgaaaatcttctctcatccgccaaaacagcttcggcgttgtaaggttaagcctcacggttcattagtaccggttagctcaacgcatcgctgcgcttacacacccggcctatcaacgtcgtcgtcttcaacgttccttcaggacccttaaagggtcagggagaactcatctcggggcaagtttcgtgcttagatgctttcagcacttatctcttccgcatttagctaccgggcagtgccattggcatgacaacccgaacaccagtgatgcgtccactccggtcctctcgtactaggagcagcccccctcagttctccagcgcccacggcagatagggaccgaactgtctcacgacgttctaaacccagctcgcgtaccactttaaatggcgaacagccatacccttgggacctacttcagccccaggatgtgatgagccgacatcgaggtgccaaacaccgccgtcgatatgaactcttgggcggtatcagcctgttatccccggagtaccttttatccgttgagcgatggcccttccattcagaaccaccggatcactatgacctgctttcgcacctgctcgcgccgtcacgctcgcagtcaagctggcttatgccattgcactaacctcctgatgtccgaccaggattagccaaccttcgtgctcctccgttactctttaggaggagaccgccccagtcaaactacccaccagacactgtccgcaacccggattacgggtcaacgttagaacatcaaacattaaagggtggtatttcaaggtcggctccatgcagactggcgtccacacttcaaagcctcccacctatcctacacatcaaggctcaatgttcagtgtcaagctatagtaaaggttcacggggtctttccgtcttgccgcgggtacactgcatcttcacagcgagttcaatttcactgagtctcgggtggagacagcctggccatcattacgccattcgtgcaggtcggaacttacccgacaaggaatttcgctaccttaggaccgttatagttacggccgccgtttaccggggcttcgatcaagagcttcgcttgcgctaaccccatcaattaaccttccggcaccgggcaggcgtcacaccgtatacgtccactttcgtgtttgcacagtgctgtgtttttaataaacagttgcagccagctggtatcttcgactgatttcagctccatccgcgagggacctcacctacatatcagcgtgccttctcccgaagttacggcaccattttgcctagttccttcacccgagttctctcaagcgccttggtattctctacctgaccacctgtgtcggtttggggtacgatttgatgttacctgatgcttagaggcttttcctggaagcagggcatttgttgcttcagcaccgtagtgcctcgtcatcacgcctcagccttgattttccggatttgcctggaaaaccagcctacacgcttaaaccgggacaaccgtcgcccggccaacatagccttctccgtccccccttcgcagtaacaccaagtacaggaatattaacctgtttcccatcgactacgcctttcggcctcgccttaggggtcgactcaccctgccccgattaacgttggacaggaacccttggtcttccggcgagcgggcttttcacccgctttatcgttacttatgtcagcattcgcacttctgatacctccagcatgcctcacagcacaccttcgcaggcttacagaacgctcccctacccaacaacgcataagcgtcgctgccgcagcttcggtgcatggtttagccccgttacatcttccgcgcaggccgactcgaccagtgagctattacgctttctttaaatgatggctgcttctaagccaacatcctggctgtctgggccttcccacatcgtttcccacttaaccatgactttgggaccttagctggcggtctgggttgtttccctcttcacgacggacgttagcacccgccgtgtgtctcccgtgataacattctccggtattcgcagtttgcatcgggttggtaagtcgggatgacccccttgccgaaacagtgctctacccccggagatgaattcacgaggcgctacctaaatagctttcggggagaaccagctatctcccggtttgattggcctttcacccccagccacaagtcatccgctaatttttcaacattagtcggttcggtcctccagttagtgttacccaaccttcaacctgcccatggctagatcaccgggtttcgggtctataccctgcaacttaacgcccagttaagactcggtttcccttcggctcccctattcggttaaccttgctacagaatataagtcgctgacccattatacaaaaggtacgcagtcacacgcctaagcgtgctcccactgcttgtacgtacacggtttcaggttctttttcactcccctcgccggggttcttttcgcctttccctcacggtactggttcactatcggtcagtcaggagtatttagccttggaggatggtccccccatattcagacaggataccacgtgtcccgccctactcatcgagctcacagcatgtgcatttttgtgtacggggctgtcaccctgtatcgcgcgcctttccagacgcttccactaacacacacactgattcaggctctgggctgctccccgttcgctcgccgctactgggggaatctcggttgatttcttttcctcggggtacttagatgtttcagttcccccggttcgcctcattaacctatggattcagttaatgatagtgtgtcgaaacacactgggtttccccattcggaaatcgccggttataacggttcatatcaccttaccgacgcttatcgcagattagcacgtccttcatcgcctctgactgccagggcatccaccgtgtacgcttagtcgcttaacctcacaacccgaagatgtttcacttcagagttgcgaaaatttgagagactcacgaacaactttcattgttcagtgtttcaattttcagcttgatccagatttttaaagagcaaatatatcaaacaagacttaacagtctgttttgagatattgaggtcggcgactttcactcacaaaccagcaagtggcgtcccctaggggattcgaacccctgttaccgccgtgaaagggcggtgtcctgggcctctagacgaaggggacacgaaaattgcttatcacgcgttgcgtgatattttcgtgtagggtgagctttcattaatagaaagcgaacggccttattctcttcagcctcactcccaacgcgtaaacgccttgctattcacttttcatcagacaatctgtgtgagcactgcaaagtacgcttctttaaggtaaggaggtgatccaaccgcaggttcccctacggttaccttgttacgacttcaccccagtcatgaatcacaaagtggtaagcgccctcccgaaggttaagctacctacttcttttgcaacccactcccatggtgtgacgggcggtgtgtacaaggcccgggaacgtattcaccgtggcattctgatccacgattactagcgattccgacttcatggagtcgagttgcagactccaatccggactacgacgcactttatgaggtccgcttgctctcgcgaggtcgcttctctttgtatgcgccattgtagcacgtgtgtagccctggtcgtaagggccatgatgacttgacgtcatccccaccttcctccagtttatcactggcagtctcctttgagttcccggccggaccgctggcaacaaaggataagggttgcgctcgttgcgggacttaacccaacatttcacaacacgagctgacgacagccatgcagcacctgtctcacggttcccgaaggcacattctcatctctgaaaacttccgtggatgtcaagaccaggtaaggttcttcgcgttgcatcgaattaaaccacatgctccaccgcttgtgcgggcccccgtcaattcatttgagttttaaccttgcggccgtactccccaggcggtcgacttaacgcgttagctccggaagccacgcctcaagggcacaacctccaagtcgacatcgtttacggcgtggactaccagggtatctaatcctgtttgctccccacgctttcgcacctgagcgtcagtcttcgtccagggggccgccttcgccaccggtattcctccagatctctacgcatttcaccgctacacctggaattctacccccctctacgagactcaagcttgccagtatcagatgcagttcccaggttgagcccggggatttcacatctgacttaacaaaccgcctgcgtgcgctttacgcccagtaattccgattaacgcttgcaccctccgtattaccgcggctgctggcacggagttagccggtgcttcttctgcgggtaacgtcaatgagcaaaggtattaactttactcccttcctccccgctgaaagtactttacaacccgaaggccttcttcatacacgcggcatggctgcatcaggcttgcgcccattgtgcaatattccccactgctgcctcccgtaggagtctggaccgtgtctcagttccagtgtggctggtcatcctctcagaccagctagggatcgtcgccttggtgagccgttaccccaccaacaagctaatcccatctgggcacatccgatggcaagaggcccgaaggtccccctctttggtcttgcgacattatgcggtattagctaccgtttccagtagttatccccctccatcaggcagcttcccagacattactcacccgtccgccactcgtcagcgaagcagcaagctgcttcctgttaccgttcgacttgcatgtgttaggcctgccgccagcgttcaatctgagccatgatcaaactcttcaatttaaaagtttgatgctcaaagaattaaacttcgtaatgaattacgtgttcactcttgagacttggtattcatttttcgtcttgcgacgttaagaatccgtatcttcgagtgcccacacagattgtctgataaattgttaaagagcagtgccgcttcgctttttctcagcggcgcggggtgtgcataatacgccttcccgctacagagtcaagcatttctttgcttttctctgttgagattctcaggagaaccccgccgacccggcggcgtgtttgccgttgttccgtgtcagtggtggcgcattatagggagttattccggcctgacaagcgaaaaatataaaaactttatcgttcgctcacttttcaggcaaaacatcttaaatatagtcttttccgtctaacttatagacaaaaacgagccccgaagggctcgttttatcatttactggacggcgacaatccggtcttcattaacttccaggcgaatcactttacccggaaccaattcaccagacagtatttgctgtgccagcgggttttcgatctgctgctgaattgcacgtttcagaggacgtgcaccatagaccggatcgtaaccgttctcgctcagcagtttcagcgcctcgtcagaaatgtggatttcataaccacgttcttccagacgtttgtacagacgtttcaactgaatctgcgcaatgctggcaatgtgctgttcacccagcggatggaagaccaccacttcatcgatacggttaatgaattccggacggaagttatggcttaccacaccgagcaccagctctttcatgtgcgcataatccagttcaccgaagcgttcctgaatcagatcggaaccgaggttagaggtcataatgacgaccgtattacggaagtcgaccgttctcccttgcccgtcagtcagacgcccatcatccagtacctgcaacagaatgttgaagacatccggatgcgctttttccacttcatccagcaggatgacggaatacggacgacgacgcaccgcttcggtcaggtagccaccttcttcataaccgacatatcccggaggcgcaccaaccaaacgagacacgctgtgtttctccataaactcggacatatcgatacggaccatcgcctcgtcgctatcaaacataaagttcgccagcgccttacaaagctctgttttccccacaccagttgggccgaggaacaggaaactaccaatcgggcgatttggatccgccagccccgcacggctacgacgaatagcgttagataccgcatcaaccgcttcgttctgaccaattacgcgatggtgcagttcttgctccatacgcagcagtttttcgcgctcgctttccatcatgcgagaaaccggaatccccgtccaacgcgccagcacttcagcaatttcggcgtcggtcactttattacgcaacagacgcatagttttgccttcgagctgcgttgcggcttccagttgcttttccagttccgggattttgccgtattgcagttcagacatccgcgccaggtcccccacacggcgagcctgttcaatagcgattttcgcctgttccagttccgctttaatggtctgcgtaccagaaaggcttgccttctctgctttccactcttcttctaactcggagtactgacgttctttgtcgctcagttcttcgttgagcatatccagacgttttttactggcttcatcagactctttcattaacgcctgttgttccagtttgagctggatgatacgacgatcgagtcggtcgagttcttctggtttactgtcaatctgcatacgaatgctggatgctgcttcatcgatcaggtcgatggctttatccggcagctgacggtcagcaatgtagcgatgagacaacgtcgccgctgcaacaattgccgggtcagtaatttgcacatggtggtgcaattcgtaacgttctttcaggccacgcagaatcgcaatggtatcttcaacagaaggctcggcaacaaacactttctggaaacgacgttccagcgcagcatctttttcaatgtactggcgatattcgtcaagcgtcgtggcacctacgcagtgcaattcaccacgcgccagcgccggtttcagcatgtttccggcgtccattgcgccatcggctttacccgcgccgaccatggtatgtaattcgtcgataaataggatgacgttgccttcctgtttggcaagatcgttaagcacgccttttaaacgttcttcaaactcaccgcgatatttcgccccagccaccagcgcgcccatatccagcgccagtacccggcggcctttcaacccttccggcacttcgccgttgataatacgctgcgccagaccttcaacgatggcagttttaccgacgccgggttcaccaatcagtaccgggttatttttagtacgacgttgcagcacctgaatggtacggcgaatttcttcatcacgaccaatcaccggatcgagtttgccctgttcggctcgttcggtaaggtcgatggtatattttttcaaagcctgacgttggtcttcagcaccttgatcgttcacgctttcacctccacgcatttgttcaatcgcttgagtaatgttggcggtggtcgcccctgctgctttcaggatgtcggccagcgtgccgcgagactcaagtgccgccagaacgaacagttcactgctgataaagttatcaccacgtttttgcgccagcttgtcgcaaagattaagaacgcgcaccagatcctgacttggctggacatcaccaccagtaccttcaacctgcggtaaacgatttaatgcctgattgatatctgtgcgcaactggccagcatttatgccagcggatgttaataaaggactaacgctacccccttcctgattcagcagggcgctcattaaatgaagtggttcgataaattggttgtcgtgcccgagtgcaagactttgggcatcggcaagagcaagctggaatttattagtaagacgatccagacgcataactcctcccataacggatcaaagttgctactggagattaaatgaggtcatccctcaattattcaaggttattgaccagattaatgtgaaaagaaaatcacgcgtaccggatcgtcttgattctttaggttatatcagccaaatgaaacttgccatacgaccggtggtcttgtcgcgacgataagagaagaaagtctcattttccgtatatgtacaacggtcgccgccgaaaatttgctcaacacccacgttcgccagacgctgccgggcaagctgataaatatccgccagatacttatcaccatgctgaatgaaagctgcacttgctttagcgtctactgccataaacgcctcgcgaacctccccccccacttcgaacgcgcgtggaccaattgccggccctaaccaggcgagaatattttccggattatcagcaaaacaggaaaccgtctcttccagcacgcctgcgcacagtccacgccagccagcatgagcggcggcgacttccgttcccgctcgattgcaaaacagcacagggaggcagtcggcagtcatcactgcgcaaaccgtgccgggcgtattgctataagaggcatccgcccgtttactggcataaggttcgccagtgagcttaagcacatctttgccgtgtacctgctcaagccagaccggtttagaaggcaaattgcccgcagcaaaaagtcgcttgcgattctcctcaacgtgatccgggttatcgccacaatgggcaccgaggttgagactgtcatacgggggcaagctcacgccgccgatacgagtggagctacaggccgcaacaccttttggctgcggccactgcgggacaatcagcttactcataaccagtccacttcatccttatgttcttcgaaatcggcgcgcatcacctcaatcagctccaccatatcttgtggaataggcgcatgccattccatttcgatgccggagatcgggtgataaagacgcagcatggttgcatgtagcgcctggcggtcaaacttacgcagcgtggagataaatgcttcgctagcaccttttggcggacgcggacggccaccataaaccggatcgcccaccagcggatgagtgatatgggccatatgcacgcggatctggtgcgtacgtccagtttccagacgcaaccgcagacgcgtgtgcacacggaagtgttccatgatgcgatagtgagtcaccgctggtttgcccatcggatgcaccgccatatgggtacgtttggtcgggtggcgactgattggctcgtccaccgtgccacctgcggtcatatgaccaatcgccaccgcttcatactcacgagtaatttcacgccgttgcaaagattcgactaaacgcgtctgagccggaacggtttttgccacaaccatcaggccagtggtgtctttatccagacgatggacgatgcccgcacgcggtacatcggcaatgggtggatagtaatgaagcaacgcattcagtaccgtgccatccgggttacccgcgccaggatgtaccaccaggtcgcgcggtttattaatgataataatgtcttcatcttcatagacgatatccagcgggatatcctgcggttcaaaacgcgcttcttcttcaatctcagcgttgatggcaacctgctcgccacccaatactttttctttcggcttatcacaaactttgccgttaaccagcactcgctggtcgaggatccattcttttattcggctacgactataatccgggaacatttcggccaaagcctgatctaagcgttgaccgagttggttttcggacaccgttgcagtgagctgtactcgttgtgccatatatactgcttcttcgtttatcgttggggttttacggctttgccgtttaatatagtgtgctattgtagctggtcttaaccgggagcaggaacagagaatctcccgtattacattttgaggaaagtcaaaacgtcatgacgcgcatgaaatatctggtggcagccgccacactaagcctgtttttggcgggttgcagcgggagtaaggaagaagtacctgataatccgccaaatgaaatttacgcgactgcacaacaaaagctgcaggacggtaactggagacaggcaataacgcaactggaagcgttagataatcgctatccgtttggtccgtatagccagcaggtgcagctggatctcatctacgcctactataaaaacgccgatttgccgttagcacaggctgccatcgatcgttttattcgccttaacccgacccatccgaatatcgattatgtcatgtacatgcgtggcctgaccaatatggcgctggatgacagtgcgctgcaagggttctttggcgtcgatcgtagcgatcgcgatcctcaacatgcacgagctgcgtttagtgacttttccaaactggtgcgcggctatccgaacagtcagtacaccaccgatgccaccaaacgtctggtattcctgaaagatcgtctggcgaaatatgaatactccgtggccgagtactatacagaacgtggcgcatgggttgccgtcgttaaccgcgtagaaggcatgttgcgcgactacccggatacccaggctacgcgtgatgcgctgccgctgatggaaaatgcataccgtcagatgcagatgaatgcgcaagctgaaaaagtagcgaaaatcatcgccgcaaacagcagcaatacataacagaaacctgaaacacaaaacggcagcccttgagctgccgtttttttattctgtcagttgtgaaactgaagcgatttagtcgctatcgatctcatcaaatatggctcgctttgagatattcctcaagtaaaaaaacatctcttcctgcgatttctcacaaaaaagattcgttgacaaaaagtgacaaaattatgagattttcatcacacattttgacatcaggaacggtatgctgaattcaccaagacgggaagacaagaggtaaaatttatgacaatgaacattaccagcaaacaaatggaaattactccggccatccgccaacatgtcgcagaccgtctcgccaaactggaaaaatggcaaacacatctgattaatccacatatcattctgtccaaagagccacaagggtttgttgctgacgccacaatcaatacacctaacggcgttctggttgccagtggtaaacatgaagatatgtacaccgcaattaacgaattgatcaacaagctggaacggcagctcaataaactgcagcacaaaggcgaagcacgtcgtgccgcaacaagcgtgaaagacgccaacttcgtcgaagaagttgaagaagagtaatcctttatattgagtgtatcgccaacgcgccttcgggcgcgttttttgttgacagcgtgaaaacagtacgggtactgtactaaagtcacttaaggaaacaaacatgaaacacataccgtttttcttcgcattcttttttaccttcccctgaatgggaggcgtttcgtcgtgtgaaacagaatgcgaagacgaacaataaggcctcccaaatcggggggccttttttattgataacaaaaaggcaacactatgacaagcgaaaacccgttactggcgctgcgagagaaaatcagcgcgctggatgaaaaattattagcgttactggcagaacggcgcgaactggccgtcgaggtgggaaaagccaaactgctcagccatcgcccggtacgtgatattgatcgtgaacgcgatttgctggaaagattaattacgctcggtaaagcgcaccatctggacgcccattacattactcgcctgttccagctcatcattgaagattccgtattaactcagcaggctttgctccaacaacatctcaataaaattaatccgcacagtgcacgcatcgcttttctcggccccaaaggttcttattcccatcttgcggcgcgccagtatgctgcccgtcactttgagcaattcattgaaagtggctgcgccaaatttgccgatatttttaatcaggtggaaaccggccaggccgactatgccgtcgtaccgattgaaaataccagctccggtgccataaacgacgtttacgatctgctgcaacataccagcttgagcattgttggcgagatgacgttaactatcgaccattgtttgttggtctccggcactactgatttatccaccatcaatacggtctacagccatccgcagccattccagcaatgcagcaaattccttaatcgttatccgcactggaagattgaatataccgaaagtacgtctgcggcaatggaaaaggttgcacaggcaaaaagtccgcatgttgctgcgttgggaagcgaagctggcggcactttgtacggtttgcaggtactggagcgtattgaagcaaatcagcgacaaaacttcacccgatttgtggtgttggcgcgtaaagccattaacgtgtctgatcaggttccggcgaaaaccacgttgttaatggcgaccgggcaacaagccggtgcgctggttgaagcgttgctggtactgcgcaaccacaatctgattatgacccgtctggaaagtcgcccgattcacggtaatccatgggaagagatgttctatctggatattcaggccaatcttgaaagtgcggaaatgcaaaaagcattgaaagagttaggggaaatcacccgtagtatgaaggtattgggctgttacccaagtgagaacgtagtgcctgttgatccaacctgatgaaaaggtgccggatgatgtgaatcatccggcactggattattactggcgattgtcattcgcctgacgcaataacacgcggctttcactctgaaaacgctgtgcgtaatcgccgaaccagtgctccaccttgcggaaactgtcaataaacgcctgcttatcgccctgctccagcaactcaatcgcctcgccgaaacgcttatagtaacgtttgattaacgccagattacgctcactgctcataatgatgtcggcataaagctgcggatcctgagcaaacagtcgcccgaccatcgccagctcaaggcggtaaatcgggctagagagcgccagaagttgctcaagctgaacattttcttctgccaggtgcagcccgtaagcaaaagtagcaaagtggcgcagtgcctgaataaacgccatattctgatcgtgctcgacggcgctaatacgatgcagccgagcgccccagacctgaatttgctccagaaaccattggtatgcttccggtttacgtccatcacaccagaccacaacttgctttgccaggctaccgctgtccggaccgaacatcgggtgtagccccagcaccggaccatcatgcgccaccagcatggcctgtaatggcccatttttcacacttgccagatcgaccagaatacaatctttcggtaaaggcggtaatttgccaataacttgctcagtaacgtggattggcacactaacaatcaccattccggcatcggcaacaatatcagccgctcgatcccagtcatgttgctccagaatccgcacctgataaccgctgagggtcagcatcttctcgaacaggcgtcccatctgaccgccaccgccgacgataaccaccggacgcagactcggacaaagtgttttaaatcctttgtcgttttcactggagtaagattcacgcatcacccgacgcaaaacatcctcaatcagatctggcggtacacccagagcttccgcctctgcacgacggctggccaacatagatgcctcgcgctccggaacataaataggcagtccaaagcggcttttcacctcgcccacttcagcaaccagttccagacgcttcgctaataaattcagcagcgctttatcgacttcatcaatttgatcgcgtaatgcggtcaattcagcaaccataataaacctcttaagccacgcgagccgtcagctgcccgttcagatcctgatgaatttcacgcagcaaggcatcggtcatttcccagctaatgcaggcatcggttacggatacaccgtatttcatttcactgcgcggttgctcggaagactgattgccctcgtggatattactttcgatcatcagaccaataatactgcgattgccatctttgatttgagcaaccacggattctgccaccgcaggctgacggcgataatctttattggaattaccgtggctgcaatctaccatcagagacgggcgcagtcccgcctgttccatctctttttcacattgcgcaacatccgcagggctatagttcggcgctttaccaccgcgcaggatcacatggccgtccggattcccctgagtttgtagcaacgcaacctgccctgcctggttaatgccaacaaaacggtgcggctgggcggcggcgcgcatagcgttaattgctgttgccagactgccgtcggtgccgtttttaaaaccaaccggcatggaaagcccggaggccatttcacggtgagtttggctttccgttgtacgagcaccaattgcactccagctaaacagatcgcccaggtattgcgggctattcggatctaacgcttccgtcgccagtggcagtcccatattcaccagctcaagcagcaatttacgcgcgatctgcagcccggcttctacatcaaaagagccatccatatggggatcgttaattaaccctttccagccgacagtggtacggggtttttcaaaatagacgcgcattaccagatagaggctatcgctgacctctgcggcaagggctttaaatcgacgagcatattccagagcagtttccggatcatgaatggaacaaggaccacatactaccagcagacgaggatcgcgcccggcgataatatcactaatgcttttacggctgtcagcaatctgggcttcttgttgcaggctcaatggaaaagcggccttcagttgttccggagtcattaaaacctgttcgtcggtaatatgtacgttattcagcgcgtctttttgcatgatggcgatcctgtttatgctcgtttgcgatagttgatcctcagcgaggatgacgtaacgataacacataaagtaaagttttcaatccatatttcgtacatttttatttacacaggcaatttagtcgcgctttcaacccttacctctgtatagataaatttacactccctttgaaaacaatccgctatgctttgaaaaaggagaaagaaatgatgaaaaagtttatcgcccccttgttggctttactggttagcggatgtcagattgatccttatactcacgcgccaaccttgaccagcaccgactggtatgatgtcggtatggaagatgcgataagcggcagcgccataaaagatgacgatgcatttagcgatagtcaggcggatcgcggtctataccttaaaggatatgccgaaggacaaaagaaaacttgccagaccgattttacttatgcccgaggactttccggtaaaagctttcctgccagctgcaacaatgttgaaaatgccagccaactgcatgaagtaggcaaaaaggggctgatgaaaatgccagcacaatacgattaaattaattaaaaccccacaaataaattaaacataagattttactcattgtgttttatttctcacattgatgacggtcgcatgaaaaaatgatattttaatgagcattctgaaaaaatatcgatgcatttcgagcgaagatggtggggatccctgaatgcgtttttctcaccgactgttcttacttctgattctcctgctgacgggagcaccaatactcgctcaggagccttctgacgttgcgaaaaacgtgcgtatgatggtttccggtattgtcagttacacccgctggcctgcgctaagtgggccaccaaagttatgtatctttagttctagtcgttttagtaccgccctacaagagaatgccgcgacatctttgccttatctgcctgtcatcattcacactcaacaagaggcgatgattagtggctgcaatggtttttattttggcaacgagagtccgacattccagatggaattaaccgaacaatatccgagtaaggcgttattattaattgccgaacaaaataccgagtgcattattggtagcgccttttgtctgatcatccacaataatgacgtcagatttgccgtaaacctggatgccttaagccgtagcggtgtaaaggtcaacccggatgtcttaatgctcgcacggaagaaaaatgatggataacgataattctcttaataagcgccccacgtttaaaagagcattacgcaacatcagtatgaccagcatatttatcactatgatgctgatctggttgctgctttccgtgaccagcgtgctgaccctgaaacagtacgcgcaaaaaaacctggcactgacagcagcaacaatgacttacagtctggaagcagctgtcgtttttgccgatggccctgcagcaactgaaacactggcagcgctgggccagcaagggcaatttagtactgcagaagtacgtgataagcagcaaaatattctggcatcctggcattacacccgtaaggatccaggcgatactttcagtaatttcataagccactggctcttccctgcccccatcattcagccgattcgtcacaatggtgaaaccattggcgaagtacgcttaaccgctcgcgacagtagtatcagccattttatctggtttagcctcgccgtactgaccggttgtattctgctggcaagtggcatcgcaattaccctcacccgccatttgcacaatggcctggtagaagcgctgaaaaatatcaccgatgtcgtacatgatgtgcgttccaaccgcaatttttcccgacgagttagcgaagaacgtatcgctgagtttcaccgcttcgctctcgacttcaacagtctgctggatgaaatggaagagtggcagcttcgtttacaggctaaaaatgcgcagcttctacgtaccgcgctacatgacccattaaccgggctggctaaccgcgcagcgtttcgtagcggcatcaacacgttgatgaacaattccgatgcccgaaaaacgagcgcgttactatttcttgatggcgataatttcaaatacatcaatgatacctggggtcatgcgacgggcgatagagtcttgattgaaatcgcaaaacggttagctgaatttggcgggctgcgacataaagcataccgcctgggcggcgatgaattcgctatggtgctctatgatgtacagagcgaatctgaagtgcagcagatatgtagtgcactgacacaaatctttaatctcccgtttgatcttcataatggccatcagaccaccatgacattaagcattggttacgcgatgaccattgagcacgcctctgcggaaaaattacaagagcttgccgatcacaatatgtatcaggccaaacaccagcgtgccgaaaagctggtgagataacaaggatatatcgatatgataaagcacctggtagcacccctggttttcaccagtctaatactgactggctgccagtcccctcagggaaagtttactcctgagcaagtcgccgctatgcaatcttatggatttactgaatccgccggcgactggagcctgggcttaagtgatgccattctgttcgcaaaaaatgactacaaattgctcccggaaagccagcaacagatccaaaccatggcagctaaattggccagcacagggctaacacatgcccgtatggatggacacaccgataactatggtgaagacagttacaacgaaggcttaagtttgaaacgggcgaatgtcgtggccgatgcatgggctatgggtggacaaattccacgcagcaatctcaccacacagggtttaggaaaaaaatatcccatagccagtaacaagaccgcccagggccgcgccgagaaccgccgcgtcgcagtggtgattactaccccttaaaacaccagcaaacagataaaaaagggccagccaattggccagcccttcttaacaggatgtcgcttaagcgaaatcttagttaagacgctctttgatacgagcagccttaccagtacgctcacgcaggtagtacagtttagctttacgaacagcaccacgacgtttgacagaaatgctgtcaactaccggagagtgagtctggaagacacgctcaacgccttcgccgttggaaattttacgaacagtgaatgcagagtgcagaccgcggttacgaatagcgataaccacgccctcgaatgcctgcagacgttttttggaaccttcaacaacccatactttcacttccacggtatcacccggacggaaggaaggtacgtcctgcttcatctgctcttgttcaagttgcttaataatgttgctcataatttaatctcttatcctgggtaaactgatatctcgggggcttacgccatcccatcatgtttatgttgctgttgtgcgtgttccgttttgaactccgccagcaaccttgcttgctcttcagtcagagccaggttttccagaagttcaggtcttctaagccaggtacggcccaggctctgtttcaaacgccagcgacgtatctcggcatggttgccgctcagtaacactggcggaacttccatcccttctaacacctcaggccgcgtatagtgcgggcaatccagcaatccttcagcaaaggaatcttccgttgcgctggcttcatgtcccagtactcccggaataaaccgggaaacggagtcaatcagcgtcattgctggtaactcaccaccactgagaacgtaatcgccgatactccattcttcgtcaatttcggtttggatcacgcgctcatctataccttcgtagcgaccgcacaccagaatcaatttttgattcgttgccagttcgctgacgcccgcttgatcaagcttgcgtccctgtggactcagataaatcacctttgcgccttcacccgccgcggcttttgctgcatgaatggcgtcccgcaagggttgcaccatcattaacatccccggtccgccgccgtaaggacgatcgtccacggtacggtgccggtcatgcgtgaagtcgcgaggactccagctctggatgctcagcaggccatttttaactgcccggccagttaccccgtaatcggtaattgcgcggaacatttcaggaaacaggctaattatgccaatccacatagcgccgtcttttaccgtttatccggtggtttaaaaaccaggatcccaatctacttcgatactacgagtagtgagatcgactttcttgataacctgcccatcgaggaacggtacgagacgttccttgataccaaacgcatctttcaggtttgccttaatgacgagaacgtcattagatccggtttccatcatatcgacgactttaccgagatcgtagccttcagtggttactacctggcagcccatcaggtctttccagtagtagtccccctcttcaagctgaggcagctggctactatccacgacaatttcacaattcgtcagcaggttcgccgcatcacgatcgtcaacgcctttcagcttgatgatcatgtcctgattgtggtgcttccagctttccagctggacttgctgccactgacccgccttctggataaaccagggctgatagtcaaaaatgctttcggcgtcttcggtggaagaaaacactctgagccacccacgaataccgtaagagctacccatttttcccaaaacgatgggatcaacaggtgcttgcgcggtgagttgtttgctcatcatgaccaccgtgacagattaagctgctttgtttacttctttgatcagcgcagcaacgcgatcagaaatagttgcgccctggccaacccagtgagcgatgcgatccagatccaggcgagtgccttcttctttttcgctagcgattgggttgaagaaaccaacgcgctcgatgaagcgaccgttgcgtgcattacggctgtcagcgacaacaacctggtagaacggacgctttttagcgccgtgacgtgctaaacgaatagttaccataacatcctcttgtgtgaataaaacaaccggaccccatcgaggaacggagtccggtgtcatattaaaagcccgaaaattttactcatttttgcgggaattgcaatcaacagttgctaactctgctgtaaaaggccgtcggcggtgcagccagtttggtgccggagtgcgcgcagtcaccggagcgtacacgcagtacgtgaggatgacgagcacatcccggtgccaaaatggcaaacaagccaggccgattagcgaccagggaagcctgggggcatcatacccttcatgcttctcatcatcttcgccattccgcccttcttcattttcttcatcatgcgctgcatgtcgtcgaactgtttcagaagacggttaacgtcctgcacctgcataccgcaaccggcagcaatacggcgtttacggctacctttgatgatttctggcttagcgcgctctttcatcgtcatgctgttgatgatggcttccatacgcaccagcactttatcgtccatctgactcttgacgttatccgggatctgccccatgcccggcagcttgcccatcagactagccatgccgcccatatttttcatctggcgcagctgctcaagaaagtcgttgagatcgaagccgtcaccttttttcagcttgctggctaatttctctgcctgcgcgcggtcaactttgctttcgatatcttcgatcaggctcagtacgtcgcccatgccgagaatacggctcgcgatgcggtccggatggaacggctccagcgcctcagttttctcgccaacaccgaggaacttgatcggtttgccagtgatgtgacgaatagagagcgccgcaccgccgcgggcatcgccgtccactttggtcaacactacgccggtaagcggtaacgcttcattgaatgcttttgccgtattggccgcatcctgaccggtcatggcgtcaaccacaaacagggtttcaaccgggttaatgctcgcatggacttgtttgatctcgtccatcatcgcttcgtcaacgtgcagacgaccagcggtatccaccagcagcacgtcgtagaatttcagtttggcttctttcagcgccgcgttaacgatatctaccggcttctgaccaacatcagaagggaagaaatcaacgcccacctgctctgccagcgtctcaagctgtttgattgccgccgggcgataaacgtcggcagaaaccaccagcactttcttcttgtgcttctcgcgcaggaacttaccgagtttaccaacgctggttgttttaccggcaccttgcaggcccgccatcagtacgaccgcaggcggttgcgcagccaggttcagggtctggttctcttcgcccatcgccgcaaccagttcgttacggactattttgacgaactcctgccccggcgtcaggctcttattaacttcatgaccaaccgctttctcttttacgcgattgataaactcacgcactaccggcagagctacgtccgcctccagcagcgccatgcgcacttcgcgcagcgtatcttttacgttgtcttcagtgaggcgtccacggccactgatattgcgcagcgtgcggctcaaacgatcggttaaattatcaaacattgtctctcgcctggggtggaaacggttggccgcaatcgcgacacatcatcagtattttgccgcagtataacatgaaggcgtctttgttgttatgcaacggttggagcagcgtagtcctgacgctatactgcttctctttcttattgctcaaactgtcgacatcactatgcccgtttttgctctgctcgcgcttgtcgcctactccgtcagtcttgcgctgattgttcccggtctgctgcaaaaaaacggcggctggcggcgcatggctattatttctgcggtcattgcgctggtctgccacgcaatcgctctggaagcccgcatcctgcccgacggtgatagcggacaaaacctcagcctgctgaacgttggtagtttggtcagtttgatgatctgtacggtaatgaccattgtggcttctcgcaatcgtggctggctgctgctacccattgtctatgcctttgcgcttatcaacctggcgctggcaaccttcatgcccaatgaatacatcacccatctggaagctacgcctgggatgctggtgcacattggcttaagcctcttttcctatgccacgctaattatcgccgccctgtacgcgctgcaactggcgtggattgattaccaactgaagaacaagaagctggcgtttaaccaggaaatgccgccattgatgagtatcgagcgtaaaatgttccacatcacgcagattggcgtggtgctgctaacgctcacgctttgcactggcctgttctacatgcacaacttatttagcatggaaaatatcgacaaggctgtgctctctatcgtggcgtggtttgtctatattgtgctgctgtggggacattatcatgaaggatggcgtggacgccgcgtcgtctggtttaacgttgcgggcgcggtaattctgacactggcctacttcggcagccgaattgtccagcagttaatcagctaaacccagaaaaggagtttcccctggaacacatttctactactacgttgatcattattctgatcatcatggtggtcatttcagcctatttttccgggtccgaaaccggaatgatgaccctcaaccgctatcgtctgcgacatatggcgaaacagggtaatcgcagcgccaaacgcgtcgaaaaattgctgcgtaagccagaccgcctgataagcctggtgttaatcggcaataacctggtcaatattcttgcctccgcgctcggcactattgttgggatgcgtttgtacggcgatgcgggcgtggcaattgcgactggtgtgctgacttttgtcgtactggtatttgctgaggtattgccgaaaaccattgccgcgctgtacccggaaaaagtcgcttatccgagtagttttctgctggctccgctgcaaattttgatgatgccgctggtctggttgctgaatgctatcacccgtatgctgatgcgcatgatgggtatcaaaaccgatatcgtggttagcggctctttgagcaaagaagagttgcgcactatcgtgcacgaaagtcgcagtcaaatttcccgtcgcaatcaggatatgctgctgagcgtgctcgatctggaaaaaatgaccgttgatgacatcatggtgccgcgcagtgaaattatcggtattgatatcaacgatgactggaaaagcattctgcgccaactctcccacagtcctcacgggcgcatcgtgctctaccgtgatagcctggacgacgccatcagtatgctgcgagtacgtgaagcctggcggttgatgagcgagaaaaaagagttcaccaaagaaaccatgctgcgcgccgcggacgagatctattttgtgccggaaggtacgccgctcagcacgcagttggtaaagtttcagcgcaacaaaaagaaagtcggcctggtcgtcaacgagtatggagacattcaggggctggtgacggttgaagatattctggaagagattgtcggcgatttcactacgagcatgagcccaacacttgccgaagaggtcacgccgcaaaacgacggtagcgtgattatcgatggcaccgccaacgtgcgggaaatcaacaaagcctttaactggcatctaccggaagatgatgcccgcacggttaatggcgtcattcttgaggcactggaagagatccctgtcgcaggcacccgcgtgcgtattggcgagtacgatatcgatattctcgacgtacaggacaatatgattaagcaggtaaaagtttttcctgtgaaaccgctgcgcgagagtgtggcggagtaacgaaaacggcccggcattcgcatgcagggccgtgaattattacgaaagcagaaattaagcttttgctttcgctacagtaaccatcgccgcacgaatcgtacgaccattcagcgtataacccttctgcataatgcccagtacgttacctggcgcaacgtcatcagattccaccattgcgatggcctgatgcacattcgggtccagtgggacgttagtttcggcgatcacttcaacgccaaacttacgcacaacatccagcatgctcttcagcgtcagctcaatgccttcaaccatcgcagacatatccgggttagctttatcagccacttccagcgcacgatccaggctatcaatcaccggcagcaattcgttgatgaatttctccagcgcgaatttgtgggctttttcaatatccagttcagtacgacgacgcaggttttccatttcggcttttacacgcaaaatgccgtcacgttcacgggtctgggcttcagccagctgagcttcgagattcgcaactttttcatcgcgcggatccacctgctcagcagaagcttctggctcaactgcctcaatctcttcgtgctgatccatgataatttcttccggggcttgcccctcaggcgttttctgttctttactactcatgaatttctccgcgtttttttcgcattcatctcgctaacttcgcttattatggggatcagtttcagggtttcaagggaagcactcacattgtcatcaatcttcgcaacaaggacctcggaaaaatgaataatcatttcaagtgtattggcattgtgggacacccacggcaccccactgcactgacaacacatgaaatgctctaccgctggctgtgcacaaaaggttacgaggtcatcgttgagcaacaaatcgctcacgaactgcaactgaagaatgtgaaaactggcacgctcgcggagattgggcaactagctgatctcgcggtagtcgttggtggcgacggtaatatgctgggcgcggcacgcacactcgcccgttacgatattaaagttattggaatcaaccgtggcaacctgggtttcctgactgaccttgaccccgataacgcccagcaacagttagccgatgtgctggaaggccactacatcagcgagaaacgttttttgctggaagcgcaagtctgtcagcaagattgccagaaacgcatcagcaccgcgataaatgaagtggtgcttcatccaggcaaagtggcgcatatgattgagttcgaagtgtatatcgacgagatctttgcgttttctcagcgatctgatggactaattattagcacgccaacaggctccaccgcctattccctctctgcaggcggtcctattctgaccccctctctggatgcgattaccctggtgcccatgttcccgcatacgttgagtgcacgaccactggtcataaacagcagcagcacgatccgtctgcgttttagccatcgccgtaacgacctggaaatcagttgcgacagccagatagcactgccgattcaggaaggtgaagatgtcctgattcgtcgctgtgattaccatctgaatctgattcatccgaaagattacagttatttcaacacattaagcaccaagctcggctggagtaaaaaattattctaattttacgccagcctctttactgtatataaaaccagtttatactgtacacaataacagtaatggtttttcatacaggaaaacgactatgttggcacaactgaccatcagcaactttgctatcgttcgtgagcttgagattgattttcatagcggcatgaccgtaataactggcgagaccggcgcgggtaaatctattgcaatagatgccctcggtctttgtctcggtggtcgcgctgaagccgacatggtgcgtaccggcgctgctcgcgctgacctgtgcgcccgtttttctctgaaagatacgccagcggctctgcgctggctggaagaaaaccagcttgaagacgggcatgaatgtttgcttcgtcgcgtgatcagcagcgatggtcgctcccgtggtttcatcaacggtacagctgttcctctgagtcaactgcgcgaactgggtcagttgctgattcagatccatggtcagcacgctcatcaattactcaccaaacctgagcaccaaaaattcctgcttgatggctatgccaatgaaacctctctactgcaggaaatgaccgcacgttatcagttgtggcatcaaagctgccgtgacctcgcgcatcatcaacagttaagtcaggaacgcgccgcccgtgcggaactgctgcaataccaattaaaagaacttaacgaatttaatccgcagcccggagagtttgaacaaatcgacgaagagtacaaacgtctggcgaacagcggtcaattgctgaccaccagccagaatgcattggcattaatggccgacggtgaagacgcaaacctgcaaagtcagctttacacggctaaacaactggtgagcgaattgattggcatggacagcaaactgtccggcgtacttgatatgctggaagaagctaccatccagattgctgaagccagcgatgaactgcgccactactgcgatcgtctggatctcgatcccaaccgactatttgaacttgaacagcgcatcagtaaacagattagcctggcacgtaaacatcacgtcagccctgaggcattgccacagtattaccagagcctactggaagaacagcagcaactggacgatcaggccgacagtcaagaaacgcttgcgctggcggtaacgaaacatcatcagcaggcactggaaatcgcgcgcgcattacaccaacaacgccagcaatatgcagaagaacttgcacagctgatcaccgacagtatgcatgcgctcagtatgccgcatgggcagtttacgatcgatgttaaatttgacgagcatcacctgggcgctgacggtgccgatcgtattgagtttcgggtaaccaccaacccaggtcagccaatgcagcctattgccaaagtcgcatccggtggtgaattgtcccgcatcgcactggcaatccaggtcatcacggcgcgtaaaatggaaaccccggcactgatttttgatgaagtggatgtagggattagcggtccaacagcggcagttgtcggcaaactgctgcgtcaactcggcgaaagtactcaggtgatgtgtgttacccacctgccacaagtcgcgggatgtggtcatcaacactattttgtcagcaaagaaaccgatggtgcgatgacagaaacgcatatgcaatccctgaataaaaaagcgcggttacaagagctggcgcgcctgcttggtggcagtgaagtcacacgtaatacactggcgaatgcgaaagaactgcttgcagcgtaaacttttttcctgcttcacggtcagagtaaacagcaaaacgccgtaagaccggaaagcaaaaggttttaaagtgatgaaaggtctattatcatcggcatattacagatgagccacgtactgctcgggcccgaaaaggaatcaaatcactatgcgctgtaaaacgctgactgctgcagcagcagtactattgatgttgaccgcaggctgttccactctggagcgagtggtttaccgtcctgacatcaaccaggggaactatctgaccgctaacgacgtatccaaaatacgtgttggcatgacgcaacaacaagttgcgtacgcattgggtacaccgctgatgtccgatccatttggtacgaatacctggttctatgtcttccgccagcaaccaggtcatgaaggtgtaactcagcaaacgctgacgctgacctttaacagtagcggtgtgttgaccaatattgataacaaacctgcgctgagtggtaactaataataaagttgctctcaaagacgttaaaaaaggtgctcaatgagcaccttttttctgtctgttatttattcgcacttttttctgctcgttgcctgcgaagctctttcggatcggcaatgagagggcgataaatctccacccgatcgccatcatgcacactatcgcttagttttgccggacggctgtaaatgccgactttgtttttagttaaatcgatatcggtacgcaattccagcaagccactggcgcgaatagcttcttcaaccgtcgcgccctcctgcagcgtcactcgctgcaggtactgcttctcaggtagcgcataagccacctcaacggcaattttacctggcactgtaaacctctttcgcacgaaccgtaaaagcctggaccatattagccgccagctctttaaacacgcgaccaaaggcgagttcaatcaacttattggtaaactcaaagtcgagatgaaactcgatacgacacgcctcctggctcagcggcgtaaacttccatccaccaatcaatttcttgaacggcccatccaccagattcataagaatactttggttactggtcaactggttgcgggtagtaaacgttttgctgatcccagccttagagacatctaccgccgcagtcatctgcccaggagtggactccagaatccgacttccggtacaacccggcaaaaactgaggataagactgaacgtcattcactaactgatacatttgctccgcgctgtagggtaccagtgcggtccggctaatctgaggcataacaatttccatcaacaaaaatccaacaaataatatcatttatcctgctgtaaaaaaaacgctatcccggcgctgggtaacatcgggttcatgctaagatagagccttgtcccccgcaggattgatatggggtgttttcgatttcagattaccgatgattcacgacgcttatgacgaagaaaaaagcacataaacctggtagtgcgaccatcgcgcttaacaagcgcgcccgtcacgaatactttatcgaagaagagttcgaagcgggacttgccctgcaaggctgggaagttaaatccctgcgcgcaggaaaagccaatatcagcgacagctacgtccttctgcgtgacggagaggcatttctgtttggcgctaacatcacgccaatggccgtggcctccacgcatgtggtgtgcgatcctacccgtacccgcaagttacttctcaaccagcgcgaactggacagtttgtacggtcgcgtcaatcgagaaggctataccgtagtggcgctctccctgtactggaaaaatgcctggtgcaaagtgaaaatcggcgtcgccaaaggtaagaaacagcacgataaacgtagtgatatcaaagagcgcgaatggcaggtggataaagcacgtatcatgaaaaacgcccaccgttaaacctgcactccaattattgaccagttcctcaccgcgcctccctctccggcggcgcgaatgaacatcttattggctatcacatccgacacaaatgttgccatcccattgcttaatcgaataaaaatcaggctacatgggtgctaaatctttaacgataacgccattgaggctggtcatggcgctcataaatctggtatacttacctttacacattggggctgattctggattcgacgggatttgcgaaacccaaggtgcatgccgaggggcggttggcctcgtaaaaagccgcaaaaaatagtcgcaaacgacgaaaactacgctttagcagcttaataacctgcttagagccctctctccctagcctccgctcttaggacggggatcaagagaggtcaaacccaaaagagatcgcgtggaagccctgcctggggttgaagcgttaaaacttaatcaggctagtttgttagtggcgtgtccgtccgcagctggcaagcgaatgtaaagactgactaagcatgtagtaccgaggatgtaggaatttcggacgcgggttcaactcccgccagctccaccaaaattctccatcggtgattaccagagtcatccgatgaagtcctaagagcccgcacggcgcaagccctgcgggcttttttgtgccctcaatttgtcccgcgaagtccgaagagaactaattaaatccgaaccttttaggcccattgataggcccaacgaaaagctctattgtttacgttgggctaaacgcagggagactccccacctttgaaaacaggatgtagcgatgaaacttaacgacagtaacttattccgccagcaggcgttgattaacggggaatggctggacgccaacaatggtgaagccatcgacgtcaccaatccggcgaacggcgacaagctgggtagcgtgccgaaaatgggcgcggatgaaacccgcgccgctatcgacgccgccaaccgcgccctgcccgcctggcgcgcgctcaccgccaaagaacgcgccaccattctgcgcaactggttcaatttgatgatggagcatcaggacgatttagcgcgcctgatgaccctcgaacagggtaaaccactggccgaagcgaaaggcgaaatcagctacgccgcctcctttattgagtggtttgccgaagaaggcaaacgcatttatggcgacaccattcctggtcatcaggccgataaacgcctgattgttatcaagcagccgattggcgtcaccgcggctatcacgccgtggaacttcccggcggcgatgattacccgcaaagccggtccggcgctggcagcaggctgcaccatggtgctgaagcccgccagtcagacgccgttctctgcgctggcgctggcggagctggcgatccgcgcgggcgttccggctggggtatttaacgtggtcaccggtagcgcgggcgcggtcggtaacgaactgaccagtaacccgctggtgcgcaaactgagctttaccggtagcaccgaaattggccgccagttaatggaacagtgcgcgaaagacatcaagaaagtgagcctggagctgggcggtaacgcgccgtttatcgtctttgacgatgccgacctcgacaaagccgtggaaggcgcgctggccagcaaattccgcaacgccgggcaaacctgcgtctgcgccaaccgcctgtatgtgcaggacggcgtgtatgaccgttttgccgaaaaattgcagcaggcagtgagcaaactgcacatcggcgacgggctggataacggcgtcaccatcgggccgctgatcgatgaaaaagcggtagcaaaagtggaagagcatattgccgatgcgctggagaaaggcgcgcgcgtggtttgcggcggtaaagcgcacgaacgcggcggcaacttcttccagccgaccattctggtggacgttccggccaacgccaaagtgagcaaagaagagacgttcggccccctcgccccgctgttccgctttaaagatgaagctgatgtgattgcgcaagccaatgacaccgagtttggccttgccgcctatttctacgcccgtgatttaagccgcgtcttccgcgtgggcgaagcgctggagtacggcatcgtcggcatcaataccggcattatttccaatgaagtggccccgttcggcggcatcaaagccagcggtctgggtcgtgaaggtagcaagtatggcatcgaagattacttagaaatcaaatatatgtgcatcggtctttaactggagaatgcgaatgaacagcaataaagagttaatgcagcgccgcagtcaggcgattccccgtggcgttgggcaaattcacccgattttcgctgaccgcgcggaaaactgccgggtgtgggacgttgaaggccgtgagtatcttgatttcgcgggcgggattgcggtgctcaataccgggcacctgcatccgaaggtggtggccgcggtggaagcgcagttgaaaaaactgagccacacctgcttccaggtgctggcttacgagccgtatctggagctgtgcgagattatgaatcagaaggtgccgggcgatttcgccaagaaaacgctgctggttacgaccggttccgaagcggtggaaaacgcggtaaaaatcgcccgcgccgccaccaaacgtagcggcaccatcgcttttagcggcgcgtatcacgggcgcacgcattacacgctggcgctgaccggcaaggtgaatccgtactctgcgggcatggggctgatgccgggtcatgtttatcgcgcgctttatccttgcccgctgcacggcataagcgaggatgacgctatcgccagcatccaccggatcttcaaaaatgatgccgcgccggaagatatcgccgccatcgtgattgagccggttcagggcgaaggcggtttctacgccagcagcccagcctttatgcagcgtttacgcgctctgtgtgacgagcacgggatcatgctgattgccgatgaagtgcagagcggcgcggggcgtaccggcacgctgtttgcgatggagcagatgggcgttgcgccggatcttaccacctttgcgaaaagcatcgcgggcggcttcccgctggcgggcgtcaccgggcgcgcggaagtaatggatgccgtcgctccaggcggtctgggcggcacctatgcgggtaacccgattgcctgcgtggctgcgctggaagtgttgaaggtgtttgagcaggaaaatctgctgcaaaaagccaacgatctggggcagaagttgaaagacggattgctggcgatagccgaaaaacacccggagatcggcgacgtacgcgggctgggggcgatgatcgccattgagctgtttgaagacggcgatcacaacaagccggacgccaaactcaccgccgagatcgtggctcgcgcccgcgataaaggcctgattcttctctcctgcggcccgtattacaacgtgctgcgcatccttgtaccgctcaccattgaagacgctcagatccgtcagggtctggagatcatcagccagtgttttgatgaggcgaagcagtaacgccgctcctatgccggaggcgacgctgcgcgtcttgtccggcctacggggatccaggtcggataaggcgtttacgccgcatccgacaatctgtacgtgaacaggaagaaatctatgttggccgggtaaggcggagccgctctccggcaaaaagaatcaataacaattatacgcgtgacccggcgcgggaaatgtcggggcgctctcccaagtgacacactttcgagaggattcaggatggggcaaagtagccaaccacatgagttaggcggcgggctgaagagtcgccacgtcaccatgttgtctattgccggtgttatcggcgcaagtctgtttgtcggttccagcgtcgccatcgccgaagcgggcccggcggtattactggcctatctgttcgccgggctactggtggttatgattatgcggatgttggcggaaatggcggttgccacgcccgataccggtagcttttccacctatgccgataaagccattggtcgctgggcgggctataccatcggctggttgtactggtggttttgggtactggttatcccgctggaagccaacatcgccgccatgatcctgcacagttgggttccaggcattcccatctggttattttccctcgtcattaccctcgccttaactggcagtaacttattaagcgttaaaaactacggcgaatttgagttctggctggcgctgtgcaaagtcatcgctatcctggcctttattttccttggtgcagtcgcaattagcggtttttacccgtatgccgaagtgagcgggatcagtagattgtgggatagcggcggctttatgcccaacggtttcggtgcggtattaagcgcgatgttgatcaccatgttcagctttatgggcgcagaaattgtcaccattgccgccgcggaatccgacacgccggaaaaacatattgtccgcgccaccaacagcgttatctggcgtatttctatcttctatttatgttctatttttgtcgtcgtggcattaattccgtggaatatgcccggactaaaagccgtcggttcttatcgcagcgtactggaattgctcaatattccccatgcgaaattaatcatggactgcgtgatattactttccgtaaccagttgcctgaacagcgcgctgtataccgcgagtaggatgctctactccttaagtcgtcgcggtgatgctcccgcggtaatgggtaaaatcaaccgcagtaaaaccccgtacgtggcggtgttactctccaccggcgcggcattcttaacggtggtggtgaactattacgcgcctgcgaaggtatttaaatttctgatcgacagctccggcgctatcgccctgctggtttatttagtcatcgccgttagtcagttgcggatgcgcaaaattctgcgagcagaaggaagcgaaattcgcttgcgaatgtggctttatccgtggctcacctggctagtcatcggctttattacctttgtgttggtagtgatgctattccgtccggcgcaacagttagaagtgatctccaccggcttattagcgatagggattatctgtaccgtgccaattatggctcgctggaaaaagctggtattgtggcaaaaaacacccgttcataatacgcgctgatcatgatcaggagtcacaccatgaccattacgtctctggatggctatcgctggctgaagaacgatattattcgcggtaattttcaaccggatgaaaaattacgaatgagtttgctgacaagccgttatgcacttggcgttgggccgttacgggaagctcttagccaactggtggcggaacggctggtcacggtggtgaatcaaaaagggtatcgggtggcgtctatgagtgagcaggagctgctcgatattttcgacgcccgcgccaatatggaagcgatgttagtgagtctggcgattgcccgcggtggcgatgagtgggaggcagacgttctcgcaaaagcgcatctgctgagtaagcttgaggcctgtgacgccagcgagaaaatgcttgatgagtgggatctgcgtcatcaggcgtttcatacggcaattgtggcgggctgtggttctcactatttgctgcaaatgcgtgaacggttgtttgatctggcggcgcgttatcgatttatctggctgcggcgaacggtgcttagcgtggaaatgctggaggataaacacgatcagcaccagaccctgactgcggcggtactggcgcgagataccgcgcgcgccagtgagttaatgcgccagcatttactgacgccaattcccattatccagcaggcgatggctggcaattaattactcttccggaatacgcaacacttgccccggataaattttatccgggctttttagcatcggtttattcgcttcgaagattttattgtacagattagcgttaccgtagacctgtttggaaatggcactcagagtgtcgccagacttaacggtataaaactggctggcagtggctggtgtcgccgttttcacctgatcatcgacactggcaataccggaaatattccccaccgcaacaaggattttctccttcgcctcctgactcaggccgtcaccagtgaccgtcgctttgccgtcggcaatttgaatattcactttatcggcatccggtataccggttttgttcagatgctcctgcaccttcttcgcctgatcgtctttatcgtgctgacctgtaaccgcgtcccagagtttttctccggcatctttcacaaaattgaacagacccatagctacctcattcgttaacggaaacactcagaaagtgtagcagaggaacgcggcgcgttaacgccgcggggatgagcacaggtttaatcgcgggtttgcacccagaacgcgtgaatcaaaccggggatatacccaagcagtgtcaacagaatattaataatgaacgcccaaccgaaccctttaccgagcagcacgccgagcggcggcagaatgatggtgatgacgattctccagaaacccatatgtactccctataagaaaattactcattgtttaaaaagagattttatctcttaagcgtagtaattttagcggagcctgccagtttcagcttacgcttttactctcatttacgctgctgaggctggtatatgttgcatttttagtttagagtttacttaatttagaaaatacttaaataaatatgactgaactcgcgcaattacaggccagtgccgaacaggcagcggccttattgaaagcaatgagccaccctaaacgattgctgattctgtgcatgcttagcggttcccccggcaccagcgcgggagagctgacgcgcattaccggactgagtgcctctgcgacaagtcagcatctcgctcgtatgcgggacgaagggcttatcgacagccaacgggatgcccaacgcattctatattccattaaaaatgaggcggtaaatgccattatcgccaccctgaaaaatgtctattgtccgtaaggagtcactatggctttgacaaccattagcccgcatgatgcacaagaattaatcgcacgcggcgcaaagttaatcgatattcgtgatgctgatgaatatcttcgtgaacatattcctgaagcagatctggctccattatccgtgctggaacagagtggtcttccggctaaattacgtcacgagcaaattatattccactgccaggcaggtaaacgcaccagtaataatgccgataaattagcagcgattgccgcccccgcagaaatctttttactcgaagatgggattgatggctggaaaaaagcaggattgccagtagcggtaaataaatctcaacccttgccgttaatgcgccaggtgcagatcgctgcgggtggtttaatattaatcggcgttgtactgggttataccgtaaatagcggtttcttcttattaagtggctttgttggtgccgggttactgtttgcaggaatcagcggtttttgtggaatggcaaggttgttagataagatgccgtggaaccaacgagcttgagaagcgacgccggacgcgccctagcagcgacatccggcctcagtaattagatcaggaaatcgtcgagagatttaccttctgccagcgcctgagcaattggcttcggtgtacggccctgaccggtccaggttttagtttcaccgttaacatcggtgaatttatatttcgccggacgcggctggcgttttttaccagcgcgtggtgcagcagcagagctattacccaataactcttccgggttaattccgtcagctttcatcagctccagccaggtgctaattttttcctggcgctctgccagttcacgctgctgctgttcttcttcttcacgtctttctttagtgacaaccctgaatttttcgagcatttcttcaagaacgtcaatggagaattcgcgagccatcgcacggagggtgcgaatgttatttaaactttgtaacattacggacataataaagaaaaccttttaacgccaaaacaaaaaaagtatttcgtcgcgtagtgtaagcgatcacttattatatttccacaaaatttaatctatttacagtcctgcgcgagattatttcagctgttattttctgaaactctcagaataatttcaagattatatattagccattttgatgagtaatttagattattggtgaacagagcggcgctctctgctcgctaattccgcaagcctgacaaaatcaaagtgaataaaaatgcaatataacagaataaaagaaaacatccatcactggtgctttctgctgttaatgtacattgtctggcataaaaaatgctgaaaatgacccagctactacatacaccgaattctctacgcttatagcgttacctcacccccaaactttcattagtgatattaaaggtaaggccatatctaattgatttaattaaaaataaatcatatcggcatgtaaaaatccacaatgtacaaaaaacgagccgttacggaatattttatctacaaaaactgactaaataaaaatttttcactaattgattagtcatagccagcgatatacgctatgcgaaaatgcagatggcaatgagatccactgctttcatctccattaacatcccattacgcttttattaaggagcattagcatgttcagtccgcagagtcgcttgcgtcatgcagttgcagatacgttcgcgatggttgtttactgttctgtcgtgaacatgtgtattgaagttttcctctccggaatgagcttcgaacagtctttttattccagattggtagcgattccggtgaacatcttaattgcatggccatacggtatgtaccgtgatctgtttatgcgcgcggcacgcaaagttagcccgagcggctggataaaaaatctggcggatatcctggcttatgtgacgttccagagtccggtgtatgtggcgatcttgttagtggtgggcgcagactggcatcagattatggcggcggtcagtagtaacatcgttgttagcatgttgatgggggcggtttatggctacttcctcgattattgccgccgactgtttaaagtcagccgttaccagcaggtaaaagcctgactcttcttttcgcgactggcatcgccagtcgcgtctttaactggcttcgccaaataaaccattcaaataacgttcaagcgcaacacggctactaaagccatgcgggataccgtaatgctcgtgtcgctcgcctgctaaatagagcggaaattgctggtaatgatcgcaagttttaatatcggaagcgggttcagccagtgtgctactgcgttcttttaatgttggatgaattaccagagcggtacgtcccattcgcgcttcgcgattaacatagacataattttccccacggcggtaaccatacgctttctgggttaccacatcgacagtaaaaccgactttttcaagtacgcgcgccacctcgtctggtcgtaaatacatatttgatcctcgttattatcaaccgcgggcctaccttacctgattgcgcattcacaacgctttcagaaaagtccataaagccgcgatgaacctcagttaagaaaattatggtctacactgaaaattacatcgaattctaatgggggatcatatgtttaaccgaccgaaccgcaacgacgttgatgatggcgtgcaggatatccagaatgatgtcaatcaattagctgacagcctcgaatctgtattgaagtcctggggcagcgacgccaaaggggaagctgaagccgcacgcagtaaagctcaggcattgctgaaagaaaccagggcgcgaatgcatggtcgtactcgcgtccagcaagccgcgcgcgatgccgttggctgcgcggattcttttgttcgtgaaagaccctggtgtagcgtgggtacagcagctgcggtaggtatttttatcggcgcactgttaagcatgcgcaaaagctaatgcaaaaatgataataaatacgcgtctttgaccccgaagcctgtcttcggggtttctttttgcctggtgaatcacaaaaatccccctaccccgtcacgctcatatccagggtaatttcgaccactatttgctatatattgtgtggttgaatcttttttcaactacatctagtatctctgtatcaacagagagacaacccgacgcgtatcatcgcgccgtatcttcattttaaacggaaatacgaatcatgcgcattactatttacactcgtaacgattgcgttcagtgccacgccaccaaacgggcgatggaaaaccggggctttgattttgaaatgattaatgtcgatcgcgttcctgaagcggcagaagcgttgcgtgctcagggctttcgtcagttgccggtagtgattgctggcgatcttagctggtctggtttccgtccggacatgattaaccgtctgcatccagcgccacacgcggccagtgcatgagccagctcgtctacttctccagcagctccgaaaacacgcagcgttttatcgaacgtttaggtctgcccgcggtgcgcatcccgctcaatgagcgggaacggattcaggtagacgagccttacatcctgatcgtgccctcttacggcggcggcggtacggctggcgcggtgccacgacaggtaattcgctttttaaacgacgagcacaaccgggcgttgcttcgcggcgttattgcttctggtaatcgcaactttggtgaggcgtatggccgcgccggagatgtgattgcccggaaatgcggcgtgccgtggctgtaccgttttgaactcatgggtacgcaaagcgatatcgaaaacgttcgtaaaggagtaaccgaattttggcaacgacaaccgcagaatgcctgacgcaggaaacgatggattaccacgcgctgaatgcgatgcttaacctctacgatagcgcaggtcgcattcagttcgataaagaccgccaggccgttgacgcctttattgcgacgcatgtgcgtccgaacagtgtgaccttcagtagccagcagcagcgcctgaactggctggtcaacgaaggttactatgatgaaagcgttcttaatcgctactctcgcgactttgtcattacgctgtttacccacgcacacaccagcggttttcgtttccagacattcctcggggcatggaagttttacaccagctatacgttgaagacattcgacggtaaacgttatctggaagattttgccgatcgagtaacgatggtggcgctgacgctggcacaaggcgatgagacgctggcgttgcaactgaccgatgaaatgctgagtggacgctttcagccagccacgccaacattcctcaactgcggtaagcagcagcgcggcgaactggtttcctgttttttgctgcgtattgaagacaatatggagagcattggtcgggcggtaaattccgcactgcagctgagcaaacgcggcggcggcgtagcatttttgctgagcaatctgcgagaagcgggcgcgccaattaaacgtattgaaaatcaatcttctggcgtaattccggtgatgaaaatgctggaagacgcattttcctatgccaaccaactcggcgctcgtcagggggctggtgcagtctatttacatgctcatcatcccgatattctgcgttttctcgacacgaaacgggaaaatgccgacgaaaaaatccgcattaaaacactgagccttggcgtggtgatcccggatatcactttccatctggcaaaagagaatgcgcagatggcgctgtttagcccttatgacgtagagcgagtttatggcaagccgtttgccgatgtggccatcagccaacactatgacgaactggttgccgatgaacgcattcgcaaaaaatacctcaacgcccgtgatttcttccagcgactggcagaaatccagtttgagtccggctatccctacatcatgtatgaagacacggtaaaccgtgctaaccctatcgccgggcgcataaatatgagtaatctctgcagtgaaattttgcaggttaacagcgccagtgagtatgacgagaatctcgactatacccgcacaggccatgatatttcctgcaatttaggtagcttgaatattgcgcacaccatggattcccccgattttgcccgcacggtagagactgccgtgcgcggtttaacggcagtaagtgatatgagtcatatccgcagcgtgccgtccatcgaagccggaaatgccgccagccacgccatcggactggggcagatgaatttacacggctatctggcgcgagaaggcatcgcttatggtagcccggaagcactggatttcaccaatctctatttctatgccatcacctggcatgcactgcgtaccagcatgttgctggcacgcgaacgcggtgaaaccttcgccgggttcaaacagagtcgctatgccagtggtgaatattttagccaatatctgcaagggaactggcagccgaaaacggcgaaagttggcgaactgtttacccgtagcggtattacgttacctacccgtgagatgtgggcgcagctgcgcgacgacgtgatgcgctacggcatatacaaccagaatcttcaggcggtgccgccaaccggttctatctcttatatcaaccatgctacgagcagtattcatccgattgtggcgaaagtagagatacgcaaagagggcaaaacaggacgcgtttactaccctgccccgtttatgactaacgagaatctggcgctgtatcaggacgcttacgaaattggcgcagaaaagatcatcgacacctacgcggaagcgactcgccatgtcgatcaggggctgagcctgacgctttttttccccgataccgccaccactcgcgatatcaacaaagcgcagatttacgcctggcgcaagggtatcaaaacgctctattacatccgcctgcgtcagatggcgctggaaggcactgaaattgaaggctgcgtctcctgtgcactttaaggaatatctatgaaactcagtcgtatcagcgccatcaactggaacaagatatctgacgataaagatctggaggtgtggaatcgcctgaccagcaatttctggctaccagaaaaggtgccgctgagcaacgatattcctgcctggcagacattaactgtcgtagaacaacaactgacgatgcgcgtttttactggcctgacgctgctcgacacgctgcaaaatgttatcggcgcgccttctctgatgcccgatgcactcacgcctcatgaagaagcggtattaagcaatatcagctttatggaagcggttcatgcccgctcttacagtagcattttcagcacgctatgccagaccaaagatgtcgatgccgcctacgcctggagtgaagaaaacgcaccgttgcagcgaaaagctcagattattcagcaacattatcgcggtgatgatccgctgaaaaagaaaatcgccagtgtgtttcttgaatcttttttgttctattccggtttctggctgccgatgtatttttccagccgcggaaagctgaccaataccgcggacctgatccgtctgattatccgcgatgaagcagtccacggttactacataggctataaatatcagaaaaacatggaaaagatatctctgggacaacgtgaagagttgaagagtttcgccttcgatttgttgctggaactctacgacaacgagttgcaatacaccgatgagctgtacgccgaaaccccgtgggctgacgatgtgaaagcgtttctctgttacaacgccaataaggctttgatgaatctgggctacgaaccgttatttcccgcagaaatggcggaagtgaatccggcaatcctcgccgcgcttagcccgaatgccgatgaaaatcacgatttcttttccggtagtggctcctcttatgtgatggggaaagcggttgaaacagaagatgaagactggaatttctgagggtgttattttcaaaaatatcactacccgcagcagggaaataattcccgccaaatagctttttatcacgcaaataatttgtggtgatctacactgatactctgttgcattattcgcctgaaaccacaatattcaggcgttttttcgctatctttgacaaaaaatatcaactttctcgatttgctctcagcccttatatcacgggaaattccggcgatttgctcgcatcaatattcatgccacatttgccatcaggggttgcctcagattctcagtatgttagggtagaaaaaagtgactatttccattgggtaatatatcgacatagacaaataaaggaatctttctattgcatggcaattaaattagaaattaaaaatctttataaaatatttggcgagcatccacagcgagcgttcaaatatatcgaacaaggacttagtaaagaacaaattctggaaaaaactgggctaagccttggcgtaaaagacgccagtctggccattgaagaaggcgagatatttgtcatcatgggattatccggcagcggtaaatccacaatggtacgccttctcaatcgcctgattgaacccacccgcgggcaagtgctgattgatggtgtggatattgccaaaatatccgacgccgaactccgtgaggtgcgcagaaaaaagattgcgatggtcttccagtcctttgccttaatgccgcatatgaccgtgctggacaatactgcgttcggtatggaattggccggaattaatgccgaagaacgccgggaaaaagcccttgatgcactgcgtcaggtcgggctggaaaattatgcccacagctacccggatgaactctctggcgggatgcgtcaacgtgtgggattagcccgcgcgttagcgattaatccggatatattattaatggacgaagccttcagcgcgctcgatccattaattcgcaccgagatgcaggatgagctggtaaaattacaggcgaaacatcagcgcaccattgtctttatttcccacgatcttgatgaagccatgcgtattggcgaccgaattgccattatgcaaaatggtgaagtggtacaggtcggcacaccggatgaaattctcaataatccggcgaatgattatgtccgtaccttcttccgtggcgttgatattagtcaggtattcagtgcgaaagatattgcccgccggacaccgaatggcttaattcgtaaaacccctggcttcggcccacgtagcgcactgaaattattgcaggatgaagatcgcgaatatggctacgttatcgaacgcggtaataagtttgtcggcgcagtctccatcgatagccttaaaaccgcgttaacgcagcagcaaggtcttgatgcggcgctgattgatgcgccgttagcagtcgatgcacaaacgcctcttagcgagttgctctctcatgtcggacaggcaccctgtgcggtgcccgtggtcgacgaggaccaacagtatgtcggcatcattagcaaaggaatgctgctgcgcgctttagatcgtgagggggtaaataatggctgatcaaaataatccgtgggataccacgccagcggcggacagtgccgcgcaatccgcagacgcctggggtacaccgacgactgcaccgactgacggcggtggtgctgactggctgaccagtacgcctgcgccaaacgtcgagcattttaatattctcgatccgttccataaaacgctgatcccgctcgacagttgggtcactgaagggatcgactgggtcgttacccatttccgtcccgtcttccagggcgtgcgcgttccggttgattatatcctcaacggtttccagcaattgctgctgggtatgcccgcaccggtggcgattatcgttttcgctctcatcgcctggcagatttccggggtcggaatgggtgtggcgacgctggttagcctgattgccatcggcgcaatcggtgcctggagccaggcaatggtgactctggcgctggtgttaaccgccctgctgttctgtatcgtcatcggtttgccgttggggatatggctggcgagaagtccgcgagcggcgaaaattattcgtccactgcttgatgccatgcagaccacgccagcgtttgtttatctggtgccaatcgtcatgctatttggtatcggtaacgtgccgggcgtggtggtgacgatcatctttgctctgccgccgattatccgtctgaccattctggggattaaccaggttccggcggatctgattgaagccagccgcagtttcggtgccagcccgcgccagatgctgttcaaagttcagttaccgctggcgatgccgaccattatggcgggcgttaaccagacgctgatgctggccctttctatggtggtcatcgccagcatgattgccgtcggcgggttgggtcagatggtacttcgcggtatcggtcgtctggatatggggcttgccaccgttggcggcgtcgggattgtgatcctcgccattatcctcgatcgtctgacgcaggccgttgggcgcgacagtcgcagtcgcggcaaccgtcgctggtacaccactggccctgttggtctgctgacccgcccattcattaagtaactctgcacttgcccggtgacgccgggcattatcaccctgccaaaaaaaggaataacaatgcgacatagcgtactttttgcgacagcgtttgccacgcttatctctacacaaacttttgctgccgatctgccgggcaaaggcattactgttaatccagttcagagcaccatcactgaagaaaccttccagacgctgctggtcagtcgtgcgctggagaaattaggttataccgtcaacaaacccagcgaagtagattacaacgttggctacaccagccttgcttccggcgatgcaaccttcaccgccgtgaactggacgccactgcatgacaacatgtacgaagctgccggtggcgataagaaattttatcgtgaaggggtatttgttaacggcgcggcacagggttacctgatcgataagaaaaccgccgaccagtacaaaatcaccaacatcgcacaactgaaagatccgaagatcgccaaactgttcgataccaacggcgacggaaaagcggatttaaccggttgtaaccctggctggggctgcgaaggtgcgatcaaccaccagcttgccgcgtatgaactgaccaacaccgtgacgcataatcaggggaactacgcagcgatgatggccgacaccatcagtcgctacaaagagggcaaaccggtgttttattacacctggacgccgtactgggtgagtaacgaactgaagccgggcaaagatgtcgtctggttgcaggtgccgttctccgcactgccgggcgataaaaacgccgataccaaactgccgaatggtgcgaattatggcttcccggtcagcaccatgcatatcgttgccaacaaagcctgggccgagaaaaacccggcagcagcgaaactgtttgccattatgcagttgccagtggcagatattaacgcccagaacgccattatgcatgacggcaaagccagtgaaggcgatattcagggacacgttgatggttggatcaaagcccaccagcagcagttcgatggctgggtgaatgaggcgctggcagcgcagaagtaatttttattcgggcggataaggcgtttttgccgcatccgccgttctgtgcacaatgcctgatgcgacgctggcgcgtcttatcatgcctacaaaccacatcgcacatttcaacaatctatctttcatcccatattcatcaacatccgctattattgatttccagcttaatcatcacctgatgaacaaaaataatgactaaacctaatcatgagcttagcccggcgctgatcgtgctgatgtctatcgccaccggtctggcggtagccagtaactattacgcccagccattgctcgacaccatcgcgcgtaacttttccctttccgccagtagcgcaggctttattgttaccgccgcgcagttgggctatgccgcaggtctactgtttcttgttcccctcggtgatatgtttgaacgccgccgcctgattgtcagcatgaccttactggcggcatgttgattaccgccagcagtcagtcgctggcgatgatgatcctcggtacggcattaaccggtttattcagtgtcgtggcacaaattctggttccgctggcagcgacgctggctagtccggataaacgcggcaaagtggttggcactattatgagcggtctgctgttggggatcttgctggcacggacagttgccggattgctggcgaatctcggcggctggcgcaccgtcttttgggttgctagcgtgttaatggcactgatggcgctggcattatggcgtggtctgccacaaatgaaaagtgaaacccacctcaactacccacagttgttgggttccgttttcagtatgtttatcagcgataaaattctgcgtacccgcgcgttgctgggctgcctgacctttgccaatttcagcattctctggaccagtatggcctttttgcttgccgctccaccttttaactacagcgatggtgtcattggtctgtttggacttgcgggagctgccggagcgttgggcgctcgtccggcgggcggttttgccgataagggcaaaagccaccacaccacaactttcggtctgctgctgctattacttagttggctggcgatctggtttggtcacacttccgtactggcgttgattatcggaatcctggtgctggatctcaccgtgcagggcgtgcatatcactaaccagacggtaatttatcggatacatcctgatgcgcgcaatcgcctgaccgcaggttacatgactagctactttattggcggtgccgccggtagcctaattagtgccagtgcctggcaacatggcggttgggctggcgtttgtctggctggcgcgacgattgccctggttaacttactggtctggtggcgaggttttcatcgtcaggaagccgcaaattaagcaatcagcaaccgttttcgtggctttacacttataagggtgttaagaagcccatcagtctgataaggttaagatattcattcagtctatttataatattaacaatcgttaagcgtacactctatggaaagccctactccacagcctgctcctggtagcgcgaccttcatggaaggatgcaaagacagtttaccgattgttattagttatattccggtggcctttgcgttcggtctgaatgcgacccgtctgggattctctcctctcgaaagcgtttttttctcctgcatcatttatgcaggcgcgagccagttcgtcattaccgcgatgctggcagccgggagtagtttgtggattgctgcactgaccgtcatggcaatggatgttcgccatgtgttgtatggcccgagtctgcgtagccgtattattcagcgtctgcaaaaaagcaaaaccgccctgtgggcgtttggcctgacggatgaggtttttgccgccgcaaccgcaaaactggtacgcaataatcgccgctggagcgagaactggatgatcggcattgccttcagtagttggagtagctgggtatttggtacggtaataggggcattctccggcagcggcttgctgcaaggttatcccgccgttgaagctgcattaggttttatgcttccggcactctttatgagtttcctgctcgcctctttccagcgcaaacaatctctttgcgttaccgcagcgttagttggtgcccttgcaggcgtaacgctattttctattcccgtcgccattctggcaggcattgtctgtggctgcctcactgcgttaatccaggcattctggcaaggagcgcccgatgagctatgaggttctgctgcttgggttactagttggcgtggcgaattattgcttccgctatttgccgctgcgcctgcgtgtgggtaatgcccgcccaaccaaacgtggcgcggtaggtattttgctcgacaccattggcatcgccagcatatgcgctctgctggttgtctctaccgcaccagaagtgatgcacgatacacgccgtttcgtgcccacgctggtcggcttcgcggtactgggtgccagtttctataaaacacgcagcattatcatcccaacactgcttagtgcgctggcctatgggctcgcctggaaagtgatggcgattatataacccacaagaatcatttttctaaaacaatacatttactttatttgtcactgtcgttactatatcggctgaaattaatgaggtcatacccaaatggatagtagctttacgcccattgaacaaatgctaaaatttcgcgccagccgccacgaagattttccttatcaggagatccttctgactcgtctttgcatgcacatgcaaagcaagctgctggagaaccgcaataaaatgctgaaggctcaggggattaacgagacgttgtttatggcgttgattacgctggagtctcaggaaaaccacagtattcagccttctgaattaagttgtgctcttggaagttcccgtaccaacgcgacgcgtattgccgatgaactggaaaaacgcggttggatcgaacgtcgtgaaagcgataacgatcgccgctgcctgcatctgcaattaacggaaaaaggtcacgagtttttgcgcgaggttttaccaccgcagcataactgcctgcatcaactctggtccgcgctcagcacaacagaaaaagatcagctcgagcaaatcacccgcaaattgctctcccgtctcgaccagatggaacaagacggtgtggttctcgaagcgatgagctaacgcgtcatctcgctcaaaaatccagatttataaaagaaaaaatgactggccagcatcgcaacatgctggcctttttggcaagcaggtcggctcagccgatgagttaagaagatcgtggagaacaatatgagcgcaaatgcggagactcaaaccccgcagcaaccggtaaagaagagcggcaaacgtaagcgtctgctcctccttctcaccttgctctttataattattgccgtagcgatagggatttattggtttttggtactgcgtcacttcgaagaaaccgatgacgcatacgtggcagggaatcaaattcaaattatgtctcaggtgtctggcagcgtgacgaaagtctgggccgataacaccgattttgtaaaagaaggcgacgtgctggtcactctcgacccgacagatgctcgccaggcgtttgaaaaagccaaaactgcactggcttccagcgttcgccaaacccaccagctgatgattaacagcaagcagttgcaggcgaatattgaggtgcagaaaatcgccctcgcgaaagcacaaagcgactacaaccgccgtgtgccgctgggcaatgccaacctgattggtcgcgaagagctgcaacacgcccgcgacgccgtcaccagtgcccaggcgcaactggacgtcgcgattcaacaatacaatgccaatcaggcgatgattctggggactaaactggaagatcagccagccgtgcaacaggctgccaccgaagtacgtaacgcctggctggcgctggagcgtactcgtattatcagtccgatgaccggttatgtctcccgccgcgcggtacagcctggggcgcaaattagcccaacgacgccgctgatggcggtcgttccagccaccaatatgtgggtggatgccaactttaaagagacgcagattgccaatatgcgtatcggtcagccggtcactatcaccacggatatttacggcgatgatgtgaaatacaccggtaaagtggttggtctggatatgggcacaggtagcgcgttcagtctgcttccagcgcaaaatgcgaccggtaactggatcaaagtcgttcagcgtctgcctgtgcgtatcgaactggaccagaaacagctggagcaatatccgctgcgtatcggtttgtccacgctggtgagcgtcaataccactaaccgtgacggtcaggtactggcaaataaagtacgttccactccggtagcggtaagcaccgcgcgtgaaatcagcctggcacctgtcaataaactgatcgacgatatcgtaaaagctaacgctggctaatccagaggtgcgtgtgatgcaacagcaaaaaccgctggaaggcgcgcaactggtcattatgacgattgcgctgagtctggcgacattcatgcaggtgctggactccaccattgctaacgtggcgatccccactatcgccgggaatctgggcagtagcctcagccagggaacgtgggtaatcacttctttcggggtggcgaatgccatcagcatcccgcttaccggctggctggcaaagcgcgtcggggaagtgaaactgttcctttggtccaccatcgcctttgctattgcgagctgggcgtgtggtgtctccagcagcctgaatatgctgatcttcttccgcgtgattcaggggattgtcgccgggccgttgatcccgcttagccaaagtctattgctgaataactacccgccagccaaacgcagcatcgcgctggcgttgtggagcatgacggtgattgtcgcgccaatttgcggcccgatcctcggcggttatatcagcgataattaccactggggctggatattcttcatcaacgtgccgattggcgtggcggtggtgttgatgacactgcaaactctgcgcggacgtgaaacccgcaccgaacggcggcggattgatgccgtggggctggcactgctggttattggtatcggcagcctgcagattatgctcgaccgcggtaaagagctggactggtttagtagtcaggaaattatcatccttaccgtggtggcggtggtggctatctgcttcctgattgtctgggagctgaccgacgataacccgatagtcgatctgagcttgtttaagagccgcaacttcaccatcggctgcttgtgtatcagcctcgcgtatatgctctacttcggcgctattgttctgctgccgcagttgttgcaggaggtctacggttacacggcgacctgggcaggtttggcctctgcgccggtagggattattccggtgatcctgagcccgattatcggccgcttcgcgcataaactggatatgcggcggctggtaaccttcagctttattatgtatgccgtctgcttctactggcgtgcctatacctttgaaccaggtatggattttggcgcgagcgcctggccgcagtttatccaggggtttgcggtggcctgcttctttatgccgctgaccaccattacgctgtctggtttgccaccggaacgactggcggcggcaagcagcctctctaactttacgcgaacgctggcggggtctatcggcacgagcataaccacgaccatgtggaccaaccgcgagagcatgcaccatgcgcagttgactgagagcgtaaacccgttcaacccgaatgcccaggcgatgtacagtcaactggaagggcttgggatgacgcaacagcaggcaagtggctggattgcccagcagatcaccaatcaggggctgattatttccgccaatgagatcttctggatgagtgccgggatattcctcgtcctgctggggctggtgtggtttgctaaaccgccatttggcgcaggtggcggcggaggcggtgcgcactaagtacaactaagccagttcatttgaactggcttttttcaattaattgtgaagatagtttactgattagatgtgcagttcctgcaacttctctttcggcagtgccagttcttcgttgctgttgatgcgtacgtcacgttccagaatgctacgcgcaatatcctgcgcttcctgcaagctgtgcatctggtaagtgccacactggtagacgttcagttccgggatctgattctgatcctgcactttcagcacgtcttccattgccgctttccaggcatcagcaacacgctgctcatctggcgtaccaatcagactcatataaaaaccggtgcggcagcccattgggctgatatcgataatctctacaccattaccgttaagatggttacgcataaaaccagcaaacaggtgctccagggtatggatccctctttctggcatcacttctttgttcggcacgcagaagcgcagatcgaacacggtgattgcgtcgccatgcggggtgttcattgttttcgccacccgaactgcaggcgcttccatccgggtatgatcgactgtgaagctatctaacaacggcatttagccacctccggtaatttttttaaaaattttctgaactctttcttcccaggcgagtctgagtatatgaaagacgcgcatttgttatcatcatccctgaattcagagatgaaattttggccactcacgagtggcctttttcttttctgtcaggcgtgtttttccagccacaccgcaaacggttcggtatcagcggcttccatttcctgctgacggcgttcagacgcctcgcgctcggctacaaaatcctcttcgcgcagaatttccagcggctcttcacgcagcagattacggtaggcttctgcaaatgctttgcctgttccgccaataccagtatcaatcatagaccttaagatacgggcagagaaagtcagatcgggattatcgaagcaggcaaccagttcatcacacactttctgatacgcttcgccgccgttaatactatccagcgtttgcgcgacgcgtttcagatcgcggaacagatctttacccacctgcggtaacgggaactgtgcggtttcgcagccgatacccagcgtcagacccggtttgcgaccttcgaggatcacccggttccagttaacgcgtgtacaggcaagttcgctactgctcatttccggtgcatcagccagcgcacaccagaccataaacaggtcgaggaatcgcacctgctgttcatctacaccaatcgggctgaacgggttgatgtccaggctacgcacttcaatatattcaatgccgccacgtaacagcgcatcagaagggctctcgccgctgcgggtaacgcgttttggacgaatcggcgcgtacagttcgttttcaatctgcaacacgttgctgttgatttgcagcctcttaccgtctttctcaataccaatcttcgcgtactcttcgcttggcgttttgattgcctgtttaaggcccgctacgtactcgtaaagatcgttgaaggtaataccaagattgctttggcttttattggtatagccgagatcgctcaaacgaagagaggtcgcatacggcaggtaatacataccgcactcggttttctcaaacggcaggctcgttggttttccttgcaggaaagaagaacaaatcgccggagatgcaccaaacagataaggaatgacccaaccgaaacgatagtaattgcggataacgcggaaatagcccgcagaaattttctctttggcatcagcgccgctgatatcaccgcacttcgcttgccagaatgccattggcaaagagaaattgtagtgcacgccggaaatggtttgcatcagcgcgccgtagcgatttttcagcccttcacgatacagcgttttaaagcgtccggtgttagaagtgccgtactgtgccagttcgatgtcctgaccttctgcgatgtagcatggcatacttaacggccacatccgctcatcgcccatattgcgcgccgtataacgatgcagatcgcgcataaaggtcagcatatgttcaatatcaccatccactggtgtaatgaattccagcaatgcttccgcaaaatcggtagtaatccatttgtgcgtcagtgcggaacctaatgcttcaggatgacctgttgttgccagtgtgccatcagcattaacacgcaaagtttcgcgctccagcccacgctgtatcccctttaacgcctgaggatgtttttccagccaggccagcgcctgacttacgtccgggatcaaattgacctcccgcctgtcaaaatcgttttaattagcataactgtaatggtgaccatatgtgcaggcctacaattagtgccaccacatcatgccctgaacggtcgctgctgcaactgcaacatagcgtaacgctttaccaaggcacaaaaaaaagattaccggtccccagctgatgcgcatccatcccgctaacagacacagtaaatcgccaaccacgggcatccagcttaataatagcgtgactgcaccatagcgtttcagccagccggtagctttctcttgccagcggcttgttttacgcaatggaaagaaacgcccaaggataacgttagttaaccctccaaggctattacccattgttgctgttaaaactaaaacccagggatgactgatcccggaaagcaacattgccaccagcacgacttcggagttgccgggtaatagtgtagcgctgagaaaactactggcaaacaagctgaaaaggcttaacgcttcactcacagcaagcgaacatccacggcgtccatgcctgctgcacgggccgcctgaataccgaaatcggcatcttcaaagaccacacactgcgtcggttgcacgcccatacgctgcgcgcacaacaaaaatgtgtctggcgcgggtttatggtgtttgacgtgatcggcagcgacgacggcgtcaaaataatggcgtaatcccaggtgcgccagcaatgcctcagcgatggcgctttcactccccgttcctacagccattgggcgacgaccatgccaacttttcaccacatcaacaagaggaagcggttcgacgctatccagcagcatacttcttactgcttctgttttttcacgcgctaacgcatgcgggtcgagatcggcctgattcagctcaataattgcctgagcaatacgccaggtggggcttccattaagcgcaatcatcgcctgaatatcgtactgaagaccgtagtgccctaatacttcgcgccacgctttacggtgcgtaggctccgtatccaggattgtgccatccatatcaaaaattaaacctgcataacgctcgtacatggtcttctcgcaagtcgaaaaatatgacgctactttagcgtaattgcttgattttgtcgctgatggcgaaggagaagaaaattcaggaaatggataaaggagttatttagaaatgagatatttttgaaggaaattttttggagaagatggtgcatccgggaggatgactcactgacgttcgcccttcgggccgttgctggcgcaacgttatccttcctggtgcctgcggttaataccgctatctcttcgataccttcattgctgaaggttacggagaatatggtgcatccgggaggattcgaacctccgaccgctcggttcgtagccgagtactctatccagctgagctacggatgcatcgggaaaacttattctactgctgatattgataccgctactaaagccatatcaattaagagatggtgcatccgggaggattactcgccttgcggctcgcccttcgggccgttgctaaagcaacgttatcatccctagtgcctgcggttaattccgctacctcttcgataccttcattgctgaagatttcggagaatatggtgcatccgggaggattcgaacctccgaccgctcggttcgtagccgagtactctatccagctgagctacggatgcatcgggaaatttattttactgctgatattgataccgctactaaagccatatcaagtaagagatggtgcatccgggaggattcgaacctccgaccgctcggttcgtagccgagtactctatccagctgagctacggatgcatcgggaaacttactttactgcagattttttgataccgctactaaagccgtatcaagtaagagatggtgcatccgggaggattactcgccttgcggctcgcccttcgggccgttgctaaagcaacgttatcctccctggtgcctgcggttattaccgccacctcttccataccttcatcgctgaaagtacgtagaatatggtgcatccgggaggattcgaacctccgaccgctcggttcgtagccgagtactctatccagctgagctacggatgcaaatggcggtgaggcggggattcgaaccccggatgcagcttttgaccgcatactcccttagcaggggagcgccttcagcctctcggccacctcaccacacgcctcttacgagtgcttcgaagaacttgtttatcgctcatcgtcgctgcgtggcgcacatattactttctgagacttataagtcaaacaatttttcctacacttttatcgtttgcacacttcacgttcaattagtctgtaaaaacgtcaaaaagagtgttttatcaacagaagaatggaggtctgacagatagtagtaatgcaaaaaaatggagacttaagttgaatgaacgggagtaaagcgaaaagactatagagtgaaggagaaattttgagggtgcgtctcaccgataaagatgagacgcggaaagattagtaactggactgctgggatttttcagcctggatacgctggtagatctcttcacggtgaacagaaacttccttcggggcatttacgccaatacgtacctggttgccctttacccctaaaactgtcacggtgacctcatccccaatcatgagggtctcaccaactcgacgagtcagaatcagcattctttgctccttgaaagattaaaagagtcgggtctctctgtatcccggcattatccatcatataacgccaaaaagtaagcaatgacaaacacattacatctaagcagtcatggcattacattctgttaaacctaagtttagccgatatacacaacttcaacctgactttatcgttgtcgatagcgttaatgcgaatgccgtgaagcgagtccacggcattgcctgacgcttatattattgcaatttcgcgctgacccagcctttcacactggctaacgctgcaggtaaggccgcagcatccgtaccaccggcttgcgccatgtcaggacgtccaccacccttgccgcccacctgctgagcgaccataccaatcagttcccctgctttcacacgatctgtgacgtccttagatacgcctgcaatcagagaaaccttaccttcgactaccgttgccagcacgataattgtgctccccagctgattttttaaatcgtcaaccatggtacgcaacattttcggctcaacaccgctaagctcgctaaccaacagcttaacaccattaacatcaattgccttactggaaagatttgcgctctcctgtgcggcagcttgttctttaagctgttgtaactctttttccagctgacgcgtacgttccagtacactgcgcactttatcagccagattattgctatcgcctttcagcagatgcgcgacttcgcttaagcgatcgctgtctgcatgaacggtggcgatagcaccttctccggttaccgcttcgatacgacgaacgcctgcagcagtaccgctttcagagatgatgcggaacagaccaatatcaccagtgcggctggcgtgagtaccgccacacaactcggtagagaaatcgcccatgctcagcacgcgtacgcgctcatcatacttctcgccgaacagcgccatcgcacctttcgctttcgccgcttcgagatccatgatgttggtttcgatcggcaaattgcgacgaatctgtgtgttcaccaggtcttcgaccgcacgaatctcttctggtttcatcgcttcgttgtgactgaagtcgaagcgcagcaccttgtcgttaaccagactacctttctggcttacatgagtacccagaacctggcgcagcgcagcgtgcatcaggtgcgttgcggagtgattcagacgaatacgggcgcgacgagcctcatcaacatcagcctgcaccgcgtcgcccactttcagagaacccgcagcaagtttaccgatgtgaccaatcgcctggccgtatttctgcgtatcttccaccgcaaaggagaagttagcgcctttcagttcgcctttatcgccaacctgaccgccggattccgcatagaatggcgtttgatccagcacgaccacagcttcctggcctgcattgatggcatcaaccgctttaccatcaacaaacagcgcagtcactttgccgttcagttccagatggtcatagcctttaaattcagatgcactgtcaacacggatcattgcgttgtaatcggcaccaaagccgctggcttcgcgcgcgcgacgacgctgctcttccattgcagcttcaaaaccagcttcgtcaactttgatgttgcgctcacgacaaacatcagccgtcaggtcaaccgggaagccataggtgtcgtacagacggaaagcagtttcaccatccagcgtatcaccagaaagttttgccagctcttcatccagcaacgccagaccgcgctccagagtacgagcaaactgctcttcttcagtcttcagcacctgctcaacctgcgcctgctggcgtttcaggtcttcacccgcagagcccataacgtcgatcagcggaccaaccagtttgtagaagaaggtttctttcgcgccgagcatattaccgtgacgcactgcgcgacgaatgatacgacgcagtacataaccacggttttcattggacggcattacgccatccgcgatcaggaacgcacaagaacgaatgtggtcagcgattacgcgcaggcttttattgctcagatcggttgcgccagtgactttcgctaccgcctggatcagcgtgcggaacaggtcgatgtcatagttagagttaacgtgttgcagcaccgcagcaatacgctccagacccataccggtatctacagacggcttcggcagcggttccatcgtgccatcggcctggcggttgaactgcatgaagacgatgttccagatctcaatgtagcggtcgccgtcttcttccgggcttcccggagggcccccccaaatgtggtcgccgtgatcgtagaagatttcggtgcacgggccgcacggaccagtgtcacccatctgccagaagttgtcagatgcgtatggcgcacctttgttatcgccgatgcgaataatacgttcgcgcgggatccctacttctttttcccagatttcgtaggcttcgtcgtcgctttcatagacggtaacccacagacgctctttcggcagggcaaaccatttttcgctggtcagcagttcccatgcaaactgaatggcatcgtgtttgaaatagtcgccgaagctgaagttgcccagcatttcgaagaaggtatggtgacgcgcggtgtaaccgacgttttccaggtcgttgtgtttaccacccgcacgcacgcagcgttgggaagtggtagcgcgggaataattacgcttgtcgagcccaaggaacacatccttgaactggttcatcccggcgttggtaaacaacaaagttgggtcgttatggggtaccagggagctgctggcaactacctgatgtcccttactatggaaaaagtcgagaaacgcctgacggatctcagcggtgctcttgctcataattatcctgaaatcaagctaacgaaatatcgccaccagctccagcgtgtcttaaccgccgggctggtaactgaaaagtgggaataagataagttttcttgactgggaagtaaaataccgtatgcgttcagtcggcaaaatttcgccaaatctcctggatatcttccatcagatagccacgatagagcagaaaacgctggatcttaactttttcactaaagacagttggcaaaggttcgccatattttcgcgtcgcctgatcgcgcgccagtgcgcaccagtcgatgtcacattcacgcatcgctttttctgtcgcttcgcgggaaatacctttctgattcagttcctggcgaatacgcgcaggtccataacctttgcggctacggctggcgataaagcgcgcaacaaatcggctgtcatcgagatagccatgttcatggcaccaggcaataacgcgctcgtaatcttctgccgtagcatcaatctcttctgggccatttttgcccataatcggtgccgcgagtttacgtcgcagttcttgctcactgtgatcgcgcaccgccagaatgcgtaccgcacgatccaacaggcgagcatatgccgggcgacgggatgtactttctgtcatggcatatccttacaacttaaaaaagcaaaagggccgcagatgcgacccttgtgtatcaaacaagacgattaaaaatcttcgttagtttctgctacgccttcgctatcatctacagagaaatccggcgtactgttcgggttgctcagcagcaactcacgtactttcttctcgatctctttcgcggtttccgggttatctttcagccaggcagtcgcattcgctttaccctgaccgatcttctcacctttgtagctgtaccacgcgcctgctttctcgatcagcttctcttttacgcccaggtcaaccagttcgccgtagaagttgataccttcgccgtagaggatctggaattcagcctgtttaaacggcgcagcgattttgttcttcaccactttcacgcgggtttcgctacccaccacgttttcgccctctttcaccgcgccgatacgacggatgtcgagacgaacagaggcgtagaatttcagcgcgttaccaccggtagtggtttccgggttaccgaacatcacaccaattttcatacggatctggttgatgaagatcagcagcgtgttggactgcttcaggttacccgccagcttacgcatcgcctggctcatcatacgtgccgcaaggcccatgtgagagtcgccgatttcgccttcgatttccgctttcggcgtcagtgccgccacggagtcaacgacgataacgtctactgcgccagaacgcgccagggcgtcacagatttccagtgcctgctcgccggtgtccggctgggagcacagcaggttgtcgatatcgacgcccagtttacgtgcgtagattgggtccagcgcgtgttcagcatcgataaacgcacaggttttaccttcacgctgcgctgcggcgatcacctgcagcgtcagcgtggttttaccggaagattccggtccgtagatttcgacgatacggcccatcggcagaccacctgccccaagcgcgatatccagactaaggctaccggtagagatggtttccacatccatggaacggtcttcacccaggcgcatgatggagcctttaccaaattgtttctcaatctggcccagtgctgccgccaacgctttctgtttgttttcgtcgatagccatttttactcctgtcatgccgggtaataccggatagtcaatatgttctgttgaagcaattatactgtatgctcatacagtatcaagtgttttgtagaaattgttgccacaaggtctgcaatgcatacgcagtagcctgacgacgcaccgcatcacggtcgccgctgaagcattcccgccgggtaatgccttcaccgcgggcagtggcaaaagcaaaccagacggtgccgacaggcttctcttcactgccgccatccggcccggcgataccactaatagacacggcataatcagcacgagccgctttcagtgcgcctatcgccatttccaccacgacgggttcactcaccgcgccatgctgcgccagcgtctcttcgcgtacgccgatcatctgcgctttggcttcgttactgtaggtgacaaatccgcgttcaaaccaggcggagctaccggcaatatcggtaatcactttcgctacccaaccaccggtacaagactcggcagttgttacggttgcgccacgggctttcagcgcctgcccaacctgttcacttaactgcatcagttcactgtcagtcatcacaacctctgtcagtcaaaaatttatgccggacaagatagcactttcgtcaggaagatggtgttggcgttgcaattttacgaggaggattcagaaaaaagctgattagccagagggaagctcacgcccccctcttgtaaatagttactgtactcgcgccagcgccacggcttgtcctaactgccagaccgccattgcgtaatgggtgctgtggttgtaacgggtgatggtgtagaagttcggcagaccgtaccagtactggtagccggtgccaacatccagacgcagcaggctggcttgttgatggttgcccagcggctgctgtggcgttaaacctgcggcggcaagctggctaatgctgtacttagttttgaagccatttggcaagcctggagcctgaccgtttgccattaccgcgacctgatcgcctttcacccagccgtgcgctttgaaatagttcgccacgctaccgatcgcatcaaccggatcccacaggttgatatgcccgtcgccgctgaaatctaccgcatattgtttgtaagagctcggcataaactgtccgtagcccatcgccccggcaaaggaacctttcagattgagcggatcgtcctgctcgtcgcgcgccatcaacaggaaggtttccagctcgccagagaaatactccgcgcggcgtgggtagttaaaactcagcgttgccagcgcatcgaggatgcgagttttccccatcacgcgcccccagcgggtttcaacgccgataatcccgacgataatttccggcggtactccatacacctgccacgcgcgattcaacgcatcttcatactgattccagaaaaccacaccgttctgcacgttgtccggcgtaataaattttttgcgataacggagccatgcgccgttcggaccacttggcggtttcacgcttgtggttggtgcctggttatccatcagccgcagtacgctatccagacgcttcgcctgggagagaatttcctgcaactgctgacgatcgaaaccgtgtttgttcaccattttgtcgatgaactgctgggcattcgggttattagcgaaatcgccgcccatctgcatcacattgtgctgcggctcaagcaggaagccgccagacggcgttccggtggtcgtatcagtctcagtaggttttggcttgctgctacaggcggcaagcaacacaaaaaggggaagcaatgttacataacgacgcttgaacatgaggggtccatttaacagattcaaccaggggcaagtatggtaaagcatcacgccccgcacaaggaagcggtagtcactgcccgatacggactttacataactcaactcattcccctcgctatccttttattcaaactttcaaattaaaatatttatctttcattttgcgatcaaaataacacttttaaatctttcaatctgattagattaggttgccgtttggtaataaaacaataaatcctgaaggagagaacaatgatagaaaccattactcatggtgcagagtggtttatcgggctgttccaaaagggcggagaggtgtttaccgggatggtgaccggcattcttccgctgttgattagcctgctggttatcatgaacgcactgattaattttatcggtcagcatcgtattgaacgttttgctcaacgttgcgccggtaaccctgtttcccgttacctactgttaccgtgcattggcacgtttgtcttttgcaatccgatgaccctaagcctgggtcgctttatgccggaaaagtacaaacccagctactacgcggcggcctcttatagctgccacagtatgaatggcctcttcccccatatcaaccctggcgaactgtttgtttatcttggcattgccagcggtctgacaacgctgaacctgccacttggcccactggcggtgagttatctgctggttggtctggtcaccaatttcttccgcggctgggtgaccgatctgaccaccgccatttttgagaaaaagatgggcattcaacttgaacaaaaagttcacctggcaggagcaacaagttgaaataacacctggcaggagcaacatcatgacgcatattcggatcgaaaaaggaacgggtggctggggcggcccgcttgagctgaaagccacgccgggaaaaaaaatcgtctatatcaccgccggtacccggcctgcgattgttgacaaactggcacagcttactggctggcaggctattgacggatttaaagaaggtgaacccgcggaggcggaaattggtgtcgcggtaatcgactgtggcggcacattacgctgcggcatctatccgaaacgacgtattcccaccattaatatccacagcacgggcaagtccggtccgctggcgcagtacattgtggaagatatttatgtctctggcgtaaaagaagaaaacatcactgtagtaggtgatgcgacaccacaaccctcttccgtgggccgtgactatgacaccagtaagaaaatcaccgaacaaagcgatggtttactggcgaaggtgggaatgggcatggggtccaccgttgcggtgctgtttcaatctggtcgtgacaccatcgacactgtattaaaaaccattctgccgtttatggcattcgtcagcgcgctcattggcatcattatggcttctggccttggtgactggattgcccacggtcttgctccgctggcgagccatccactgggtctggtcatgctggcgctcatctgttccttcccactgcttagtcctttcctcggcccaggcgcagttatcgcacaggttatcggcgtattgattggcgtgcagattggtctcggcaatattccgccgcatctggctttaccggcactgtttgccatcaacgcgcaggcggcctgcgacttcatcccggtcggtttgagcctggcggaagcccgtcaggacacggttcgcgtcggtgtcccttctgtactggtgagccgctttttaaccggcgcgccgactgtactgatcgcctggtttgtctccggttttatctatcaataaaggctgaaacatgaccgttatttatcagaccaccatcacccgtatcggcgcgagtgccattgacgccctcagtgaccagatgctcatcacctttcgtgaaggcgcgcctgcggacctcgaagagtattgcttcattcattgccacggcgagttgaaaggtgcactccatcccggtttgcaatttagtctcgggcagcatcgctatccggtgaccgctgttggcagcgtggcggaagacaaccttcgcgaactgggtcatgtcaccctgcgcttcgatggtttaaacgaagcggaatttccgggcactgtccatgtggcaggccctgtccccgacgatatcgcgccgggaagcgttttgaagtttgaatctgttaaggagtaaaaaatgaatcaggttgccgttgtcatcggtggtgggcaaaccttaggcgcgttcctgtgccacggtctggctgccgaggggtatcgcgtcgcggttgtcgatattcagagcgacaaagccgcaaatgtggcacaagaaattaacgccgaatatggtgaaagtatggcgtacggttttggtgctgacgccactagcgagcaaagcgttctggcgctctctcgtggggtagatgaaatctttggtcgcgtggatttgctggtctacagcgccggaatagcaaaagcagcctttatcagcgacttccagctcggcgattttgaccgtagcctacaggtgaatctggtgggttatttcctgtgtgcgcgtgaatttagccgtttgatgatccgcgacgggattcaggggcgcattattcagatcaacagcaaatccggcaaagtgggcagcaaacacaactctggctacagcgcagcgaaatttggtggcgtcgggctgactcaaagtctggcgctggatctggcggagtacggcattacggtgcatagtctgatgctcggtaacctgctgaaaagcccgatgttccagagtctgttgccacaatacgcgaccaagctgggtatcaaaccggatcaagtcgagcagtattacatcgacaaagtaccgctcaaacgcggctgcgattatcaagatgtgctgaatatgctgctgttctacgccagtcctaaggcgagctactgcaccggacagagcatcaatgtcaccggcggtcaggtgatgttctgatcaacagcggagatccattaaggatctccgtgagactatagaatgcctgatgcgctacgctcatcaggcatacaggacttccgccactacattaaggaaaagttatggtatccgcactcatcaccgtcgccgttatcgcctggtgtgcgcaactggccttaggcggctggcaaatttctcgttttaaccgtgccttcgacacactatgccagcaagggcgggttggcgtgggccgttccagcgggcgctttaaaccgcgggtcgtggtcgccatcgcgctggacgatcagcagcgcatcgtcgacaccttgtttatgaaaggactgaccgtcttcgcccgaccgcaaaaaattcccgcaattaccggtatgcatgcgggtgatttacagcccgatgtgatctttccccatgatccactaagtcagaatgctctaagtttggcgcttaaactgaaacgtggataatttcgttgtgaatgttacttgcttgcgaagttatcattttgaaacctaaatcaggtaatcacgcccatgaaacctcgtcagcgtcaggccgccattctggagtatctgcaaaagcagggtaaatgcagcgttgaagaattggcgcaatactttgacaccacaggcacaaccattcgcaaagatctggtcattctggaacatgccggaaccgtcattcgtacttatggcggagtggtgttgaataaagaggaatccgatccgcctatcgatcataaaacactcatcaacacccacaagaaagagctgattgcagaagctgccgttagttttatccatgatggcgatagcatcattcttgatgctggcagtaccgttttgcagatggttcccctgctcagccgctttaataacatcacggtgatgaccaacagcctgcatatcgtcaatgcgctatccgaactggataacgaacaaactatcctgatgccaggcggaacgtttcgcaaaaaaagcgccagttttcacgggcaactggcagagaatgccttcgagcatttcaccttcgataaattgtttatgggcaccgacggcatcgatctcaatgcgggcgtaaccacctttaacgaggtttataccgtcagtaaggcaatgtgcaatgccgcgcgcgaagtgattttgatggcggacagtagtaagtttggccgtaaaagccccaacgtagtttgcagtcttgaaagcgtcgataagctgattaccgacgcaggtatcgatccggcgtttcgtcaggcgctggaagagaaagggatcgatgtgatcataaccggagagagcaatgagtgaagcactactgaacgcgggacgtcagacgttaatgctggagttgcaggaagcaagccgtttaccggaacgtctgggcgatgattttgttcgcgccgccaatatcatcctgcactgtgaaggcaaagtggtggttagcggaattggcaaaagcggccacattggtaagaaaatcgccgcaacgcttgccagtaccggcactccggctttttttgtccatccggcagaagcgctgcacggcgatctggggatgatcgaaagccgcgatgtgatgctgtttatctcttactccggtggcgcgaaggaactggatctgattattccgcgtctggaagataaatctatcgcgctgctggcgatgaccggcaaaccgacgagtccgctgggcctggcggcaaaagcggtgctggatatctccgtagaacgcgaagcctgcccgatgcaccttgcgccgacctccagcaccgtcaataccctgatgatgggtgacgcgctggcgatggcggtcatgcaggcgcgcggatttaatgaagaagattttgcccgctcccacccagccggggcactgggcgctcgcttgctgaataaagtgcatcatctgatgcgccgtgacgatgccatcccacaggtggcgttaaccgccagcgtgatggatgcgatgctggaactcagccgcaccggtctggggctggtggcggtatgtgacgctcaacaacaggtacaaggcgtctttaccgacggcgatttacgtcgctggctggttggcggcggcgcactcaccacgccagtcaatgaagcgatgacggtcggcggcaccacgttgcaaagccaaagtcgcgccatcgacgccaaagagatcctgatgaagcgcaaaatcactgccgcaccggtggtggatgaaaacggcaaactcaccggcgcaataaacctgcaggatttctatcaggccgggattatttaatccttcaatcccagacgtttcgccagccgatgcaggttggcgacgtcggtttccagcatccgcgcgcaggcagcccagttgtgatgattttgtgccagtgcctgacgaatagtttcacgctggaacgcttctgtcgcttcacgcaggttttgcttaacaacgggcaccgccgccacttctggcgtcggcaacgtcacctcaggaaaagcaaaatgttgcgcctcaagaatcacttcatcgccgctgcgggtggctctcgccagaactaccgcccgatgaatagcatgttccagttcgcgcacgtttcccggaaaactgtagtgttgcagtaaatttcgcgctccggcacttaataccacgcgggagagcccctgccgcaaacgacactgctcgcagaaataccccgccagcagaatgacatcatcgccccgctcacgcagcggcggcacgctaagtggaaacacgctcaggcgatgaaacaaatcggcgcggaatcgccctgccagcacctcttcgcgtaaatcgcggttagtcgccgccagcacgcgcacatcgacccgcaaacaacggtcatcgccaacgcgctgaatatcgccatactgcaacaccctcagcagcttggcctgcaatgccaagctcaactcgccgatctcatccagaaacagcgtgccgttatccgccatttcaaacttcccgctgcgattactgatagcgccagtaaacgctcctttcacatgcccgaacaactcactttccgccacactttccggcagtgcagcacagttgagatagaccagcggattcaccgcccgtgggctggcttcatgaatcgctttcgccaccagctccttaccggttccagtctcaccgctgatcaggacgttgagatcggacgccgccacaatctcaatctcttttttcagttgcgtcatgccaggggacaagccaatcatctgcgtctgtttcaccgcttcaaacggcgtggcatcgcctggcagcatattctggctttccagttgttcaatcagcaacgcattgcttaacgctcccgccgccagcgcagcaatcagccgtagctcttcgtcgctgaaaacatcgaactgatcgggctgcatcccgtcgagcgtcagtgcgccgatcaggttttgcccggcaaacaatggcagaccaacgcaggcgtgaaccttcagactctcctgcccaggaatcaaaccgtcatagggatcgggcaattcgctgtctgcgggaaagcgcaccacatccccggcgcgggcaatcgcttccagccgtggatgcccttccagcgcaaagcgtctaccgagtacatcctttgccagaccgtcgatggcaagcggaataaactgccggctatcgtaacgtagcaacgcagacgcatcgcactccagcacctgacgtagcgtggtgatcaggcgctgaaaacgatcctggtgaccaatcccacgctgcaattcgatggcgatattcgccagcacatcaacggaaaaactcatctttgcctcactgtcaatttgactatagatattgtcatatcgaccatttgattgatagtcattttgactactcattaatgggcataattttatttatagagtaaaaacaatcagataaaaaactggcacgcaatctgcaattagcaagacatctttttagaacacgctgaataaattgaggttgctatgtctattgtggtgaaaaataacattcattgggttggtcaacgtgactgggaagtgcgtgattttcacggcacggaatataaaacgctgcgcggcagcagctacaatagctacctcatccgcgaagaaaaaaacgtgctgatcgacaccgtcgaccataaattcagccgcgaatttgtgcagaacctgcgtaatgaaatcgatctggcggatatcgattacatcgtgattaaccatgcagaagaggaccacgctggggcgctgaccgaactgatggcacaaattcccgatacgccgatctactgtacagccaacgctatcgacagcataaatggtcatcaccatcatccggagtggaattttaatgtggtgaaaactggcgacacgctggatatcggcaacggcaaacagctcatttttgtcgaaacaccaatgctgcactggccggacagcatgatgacttacctgacaggcgacgcggtgctgttcagtaacgatgctttcggtcaacactactgcgacgagcatctgttcaacgatgaagtggatcagacggagcttttcgagcagtgccagcgttactacgccaatatcctgacgccgttcagccgcctggtaacaccgaaaattaccgagatcctgggctttaacttaccagtcgatatgatagccacttcccacggcgtggtatggcgcgataacccgacgcaaattgtcgagctgtacctgaaatgggcggctgattatcaggaagacagaatcaccattttctacgacaccatgagcaataacacccgcatgatggctgacgctatcgcccaggggattgcggaaaccgacccacgcgtggcggtgaaaattttcaacgtcgcccgaagcgataaaaacgaaatcctgactaatgtcttccgcagtaaaggcgtgctggtcggcactagcacgatgaataacgtgatgatgccgaaaatcgccgggctggtggaggagatgactggtttacgcttccgtaacaaacgcgccagtgctttcggctctcacggctggagcggcggtgcggtggatcgtctttccacgcgcctgcaggatgcgggtttcgaaatgagccttagcctgaaagcgaaatggcgaccagaccaggacgctctgaagttatgccgtgaacacggtcgcgaaatcgcccgtcagtgggcgctcgcgccgctgccgcagagcacggtgaatacggtagttaaagaagaaacctctgccaccacgacggctgacctcggcccacggatgcagtgcagcgtctgccagtggatttacgatccggcaaaaggcgagccaatgcaggacgttgcgccaggaacgccgtggagtgaagtcccggataacttcctctgcccggaatgctccctcggcaaagacgtctttgaagaactggcaagcgaggcaaaatgagtaacggcattgtgatcatcggtagcggcttcgccgcccgccaactggtgaaaaatattcgcaaacaggacgccactattccattaaccctgattgccgccgacagcatggatgagtacaacaaacctgacctcagccatgttatcagtcaggggcaacgtgccgatgaccttacccgccagacggcgggtgaatttgccgagcagtttaatctgcacctgtttccacaaacctgggtgacggatatcgatgccgaagcccgtgtggtgaaaagccagaataatcagtggcaatacgacaagctagtactggcaaccggtgccagtgcctttgtcccgcctgtgcctgggcgtgagttaatgctgacgttaaatagtcagcaagagtatcgcgcctgtgaaacgcaactgcgggatgcccgacgcgtgttgattgttggcggtggtttgattggtagcgaactggcgatggatttttgtcgtgcaggcaaagcggtcacgctaatcgacaacgctgccagtattctggcgagcttaatgccaccggaagtaagcagccgcttgcagcatcggttgacggagatgggcgttcatctgctgttgaaatctcagttacaggggctggaaaaaacggattctggcattcaggcaacgctggaccgccagcgcaatatcgaagtggatgcggtaattgccgccaccggactgcgcccggaaaccgccctggcacgacgcgccgggctgacgattaatcgcggcgtttgcgtcgatagttatctgcaaaccagtaataccgatatttacgcgctgggcgattgcgcggaaattaacggtcaggtattgccgttcctccagccgattcaacttagcgcgatggtgctggcaaaaaatcttctcggcaataacacgccgctgaaactcccggcgatgctggtgaaaatcaaaacgccggaattaccgctgcatctggcaggcgaaacccagcgtcaggatttacgctggcaaattaataccgaacgccagggaatggtggcgcgcggcgttgacgatgctgaccagcttcgcgcctttgtggtcagtgaggatcggatgaaagaggcatttggattgttgaaaacattgccgatgtaagtgggctactgtgcctaaaatgtcggatgcgacgctggcgcgtcttatccgacctacggggacgcatgtgtaggccggataaggcgtttacgccgcatccggcaatggtgtccaaatgcaacacgttttatccgttctggacttcacccgctaaccaacgcgccgcagcaataaccccctgccccagagacaaaccgccatcacccgccggtaaactctgtggaaagagcaatgtgaaatcagcgagataatgcgccagacgtgcacgcagcaaacggttatgaataaccccgccgctaaataccagcgtagtgataccacgcatcgtggcctgctcacgcatcaacgcggcaaaaccctgcgccagcgcatcatgaaacgcccacgcgcgttgattaaccggtgcctgccagttcagccactgctgccagaaagtggcgagatccagttgattgtccacccgcggcattgtcaccggatgcgtcactccgtggcaactggctgcgagcgcctccagagcacaagccgcttcaccttcataacttaacgtggctggcgcacagcccagtgccgccgccactgcatcgaaaaaacgcccacagctactcgccagcggcgcgttaattccacgctcaatggcccgcgccagcacgctccagttttgctgttgcacacttgctgtttcagagtaattctgccactccggcacaaagcgcaggcactgcgccagcaggtttcgccacggctgcttcgctgccaaatcgccacccggaagcgccactgcaggcaagccgcccaggtgctcacattcgcgatagttcacccgcaggcactcgccgccccacaaagcgccgttctcccccataccgataccgtcgagcgtcaaagcaatgacatcaccgccatccagcggccactgatgctctgccagacacgccgctgcatgggcatgatgatgcagtaccgtttgcgtcggcagattcatttcacgcgcccactggctggagacatagcccggatgcgcgtcatgcacaacgtattgcggggtaaaatcgtagatgttttgcatcaggcgtaacgcttcgcgccactgcatctggatgccatcgtcacttaaatcgcccagatgctgactcaacaccgcttgttcaccgcgcaccaggcagaaggtatttttcagatccgcgccgagacacagcacaggcggaacatttttaaagcccggaggcaaagccagcgcatccggcacatacccccggctacggcgcagcatttcgccgctttcgcgcaccacgctatcatccatccgctgcacgatgtcgcggttatgtatcaagaatccgtcggcaatgccctgcaaatccgccagcgcctgttcgttgctgatagctggtggtttaccgctcaggttgccggaggtcatcaccagcgggcattgcagttcctgtaacagcaaatgctggagcgggttcgcaggcaacattaccccgacttcgttaaggtcaggggcgatatcatcacaaagctcaggaacgtattttttatccaccagcacaatcggcgcggcgggcgtggtaagcaactggcgcgcagcgtctggtaaaccgtcagccactggcaacatgaccgccagcggtttcgccgggcgatgtttgcgcgcccgaagtgtcgccaccgcgttactgttacgtgcatcgcaggcaagatgaaatccgccaatccctttgatggcgacaattttgcccatttttaactgtgcgatagctgcctgtaatgccgcctcttgttccgcatgttcaccatgacttacccattcaagatgcgggccacactccgggcaggccaccggctgggcgtggaagcgacgatcgagcgggtcacggtactctttgtcacaggccggacatagcggaaacgccgccatcacggtaaacgggcggtcgtaaggcatggcgcgaataatggtgaaacgcgggccgcagtgggtacagttgataaacggataacgataacgccgttcgcctggggtattcatttcggcaaggcaagcagggcaagtagcggcatcgggaacaatttgcgtattcatggtgccgcctgtgctctggcgtatagtgaactcggtgggcagttgactccagataaacggctcacgctcgacgctatcaatacgcgccagcggcgggcagtgctgatacaattgaacaagaaacgtttccgggtcttcccgcagccggacttctacgccatcgccgtcattacagacatcgccgtgaagatttaattgctgtgccagctgccagacaaacggacgaaaaccgacgccctgcactttgccacgaatacgcagttggacaccgcaagatgtgttttttgccattgagttattcccgccatcatgaattgcgtaacccgccctgccggacacgacagcgtcgcatccggcagtcacaggtcggcgataccgcccgctccgtattctacgaatatttccgggaattcctttgatgccagaacagttctgtaagatttttagaacatcagcgccgtacggcggcgtttttctgcgctcagttgttcaagtttattacgatcgacacaaatcagcgcatgagtcgggcaagccgccatacacgccgggccgtcttcacgatggttgcacaggtcgcatttattggcttcggctttgtcagcccgtacattcagacccgcgccgctgttgcggatcaccggacgtaccaccacttccatcgcaccatacgggcaagccacaacgcaggttttgcaaccaatgcaacgttcctgcatcacatgaacaaaccctttatcacggctgatagcaccattcgggcagacgttagcgcacggtgcatcttcacactgacggcaaactgtcgccgtggaaatgttcacacctttaatgacatggatacgcggtaaaaaagtttccggggtcaggcttgcacagtcctgattttcctgatgagaaaccacgcacgctacttcacaggtacggcaaccaatacatttactcgcgtcagcaatgatgaaacggttcatcaaattctccagcaatgacagttaatgcgccgatacattcacaaatcatgccagtttttaatttactgttatttaaggaaattaatttctgtaatgcaggaaaaacgatgtcatcgacactagtgacgatgacatgtgatgacaatgtttatcggctaggagcaatgagactgtcgcggcggatcagttttccgctgaaggttttcggcggactgaaatccccgccatcgagcataaaaatcagccgtccaataatttcctgaatcatctcagtcaccggaatttttacgctggagagcgccggaacggtgtagggggcaatagcgatatcatcgaatccgataacactcacctgctctggcaccgctacgccgcgctcgtgtaacgctttcatcgcacctatcgccatatcgtcgttactggcaactaacgcgctaaatttagccccacgttcgagcaacatttctaccccttcggccccgctggcaggcgtccatttaccgttagcgataagtttttcattgagcgcaataccatgctgcgccagcgcgtctttatacccggcaagacgttcaatgctggtgggggaatccatgctgccggtaaggaaagcaatctcctgatgcccggcgtttatcaactctgccacggcgttaaaactggtctgtttatgatcgcaccagacgctatggctgctgtttttgcgcaggcggcgattaagcaccattatcggctgactgtgcgcgtcaatgatgtcatcgatctcatccacgcttaaaaaacgcgggtaaatcatgatcgcgtcgcagcgcagatccagcagatactgaatcgcctggcgctcttcttctgcgctgtgtttaccatctgccaatagcaactgccgccctttctcttccgccattcgcgcggcatgaaagagtaattcactaaaataaatgccgtggtaaagcgtgttggtcactaccagccccagcgtctgagtactcttcgcgctcagattgcgcgccagcaagtttggacggtaaccgctctcttctaccgcctgaaacacgcgatctttagtctcctggctgacgtagccattaccactaagcacgcgggaaacggtcgctttactaaccccggcgcgcttcgccacttccagcatcgtcgtcatcattttcatccctttacacgcaatcaacgcagtgtactgcaccgtttgccgattgtccttgcacaatcggcgggaaaaatattcaggtgaccggtttcacaaatataaaaaatgaacaattcactctcttgcttatttagtgacaactattcatgattttgtgaaaccggtttcttaattccgtttcagcatcggcatttttccgtcacgtcgactgataacaactacatctaccctactgataacaggataaaatccgatggccaaaaattatgcggcgctggcacgcagcgtgatagcggcactgggcggcgttgataacatcagcgcggtcacgcactgtatgacgcggttgcgctttgttatcaaagatgatgcacttatcgacagcccgacgttaaaaaccatccccggcgtgctcggcgtggtacgtagtgacaaccagtgtcaggtgattatcggcaataccgttagtcaagcctttcaggaagtcgtcagcctgctgccgggagatatgcagcccgcacagcccgtgggtaaacccaaactcacgctacgtcgcattggtgcggggatcctcgatgcgctgatcggcaccatgagtccgctgatcccggcgattatcggcggaagcatggtcaaactgctggcaatgatcctcgagatgagcggcgtgctgacaaaaggaagcccgaccttaaccattctgaatgtgattggtgacggtgctttcttcttcctgccgctgatggtcgcggcatctgccgccatcaaatttaaaaccaatatgagcctggcgattgccatcgcgggtgtgctggtacatccgagttttattgaactgatggcgaaagcggcccagggtgaacatgtcgaatttgccctgattccggtcaccgcggtgaaatacacctacacggtgatcccggcgctggtgatgacctggtgcctgagttatatcgaacgctgggtggacagcattacaccggcggtgaccaaaaacttcctcaaaccaatgctgattgtgttgattgccgcaccgctggcaatcctgctgattggcccgattggtatctggatcggtagcgccattagcgcgctggtttacaccattcatggttatctgggctggcttagtgtcgccattatgggcgcgctgtggcctctgctggtaatgaccgggatgcaccgcgtctttacgccaaccatcattcagaccattgccgaaaccggcaaagaagggatggtcatgccgagtgagatcggcgctaacctgagcctgggcggtagtagtctggcagtggcgtggaaaacgaaaaacccggaactgcgtcagacggcgctggctgcggcggcaagtgccattatggcggggatttccgaaccggcgttatatggcgtggcgatccgcctgaaacgtccgcttatcgccagtcttatcagcggttttatttgcggcgcggttgccggtatggcggggcttgccagccacagtatggcagcgccggggctatttaccagcgtgcagttcttcgatccggcgaatccaatgagcatcgtctgggtgttcgcggtcatggcgctggcggtggtgctgagctttatcctcacactgttgctcggctttgaggatattcctgttgaggaagcggctgcccaggcgcgaaagtatcagagcgtacaaccgaccgtcgccaaagaagtaagtcttaattgaggatgaaaatgagtgtatttccagaaagttttttatggggcggcgcgcttgccgccaaccagtctgaaggtgcgttccgtgaaggtgacaaaggtctgaccactgtcgatatgatcccacacggcgagcatcgaatggcggtgaaactggggctggaaaaacgttttcagttgcgagatgacgagttttatcccagccatgaggcgacggatttttatcatcgttataaagaagatatcgccctgatggcagagatgggattcaaggttttccgtaccagtattgcctggagccgtctctttccgcagggcgatgaaatcacgcccaatcagcagggcattgctttttatcgttctgtctttgaagagtgtaaaaagtacggtatcgaaccgctggtcacgttgtgccacttcgatgtgccgatgcatctggtcaccgaatatggctcctggcgtaaccgcaagctggtggagtttttcagccgctacgccagaacctgctttgaagcatttgatggtctggtgaaatactggctaaccttcaatgaaatcaacattatgttgcatagcccgttctccggcgcgggtctggtgtttgaagaaggtgaaaatcaggatcaggtgaaatatcaggccgcgcatcaccagctggttgccagtgcgctagccaccaaaatcgcccatgaggttaacccgcaaaatcaggtgggctgtatgctggcgggcggtaacttctacccttacagttgcaagccggaagatgtctgggcggcgctggagaaagaccgggaaaacctgttttttatcgatgtgcaggcgcggggcacgtatccggcttactctgcccgcgtattccgcgaaaaaggggtaaccatcaacaaagcaccgggcgatgatgaaatcctgaaaaacaccgtcgattttgtctctttcagctattacgccagccgctgcgccagcgcggagatgaacgccaacaacagcagtgcggcgaacgtggtgaaaagcctgcgtaatccgtatctacaggtgagcgactggggctggggaattgatccactcggtctgcgtatcaccatgaatatgatgtacgatcgttatcagaagccgctgtttctggtggaaaacggcctgggcgcaaaagatgaatttgctgccaatggcgagattaacgacgactatcgcatcagctacttacgcgaacatatccgcgcaatgggcgaagcgattgcagacggcattccgctgatgggctacaccacatggggctgtattgatttagtttccgcctctacgggtgaaatgagcaaacgctacggctttgtctttgttgaccgtgacgacgcaggcaacggtacgctgacgcgcacgcgtaagaaaagtttctggtggtataaaaaagtgattgccagtaatggggaagatttagagtaagtaacagtgccggatgcggcgtgaacgccttatccggcctacatgtcgcacgaaccatgaaggcccgataagcgcagcgcatcgggcaatttagcatttggcatcagagctggttcaccccatcaagaacatccctgtcctgattccttaatgaaaaattactcttcttccaccgctaactgcgcgaagccgccatttccttcccagccttccagtcgttgataaacggtttctaccgcatctttaatcggctgggtcatcgggtagtaaaagccgacgatatccggctgaatgccgaggaaaatcacttcgccaatatcttctttcaactggtcgataaggtaattcaacggcatgttatgggtagtcatcataaacatctcggcgatatcatccgggtcgatgatgcggatctcgccggggtttagccccatatccgtggcgtcgacaatcagcagtcgtgtcgggcgcagttcacggatagcgacgatgtcgttttccggtgcgctaccgccgtcaatcaccacccagttacctttcggcgcggcggcgcacttttccgccagcagcggacctgcgccatcatcgcccatcatgctattgccaacacagagtaaaacgtcagtcacgcagtctcctcaccatcaaatagatggcgttttcctgatgaatatcatgcagcatacttaacagcattgtactccattcctgctgctggctagtttgcgctgcccgggctttatcgaatgcgttggccagcatcggcacatggttaatgtcgatgacgatctcaccatatttcggcacgccttccattttgcggcgggcttcactgcctgcctccagagtggcaatccatgccagatattcatcccacgggcaggtgagcgccgcttccaggcaatcgataaccccaaggtggtgaccaatcgccaggctgtaatagaccacctgctgcgcctcggcgggcgtggcatcgttctcatcaataaatttatggctcagttgactgaacaccaccttttcactcatcggatacgcgcctcttcaacaacatgattcagatggctgacaatctcgttcagacgcggatcgttttccgcttccagccagcgtgcaacctgttcttcgccctgccctaactgtgtaaggtaatcatcggcaatctgacgaccgtaacgataacccgccaggcgacgtgcttcgcgatccactttcacgcgcagcggctgcaccatatcaccatgcaggatctccgccggttgttcatccagttcacccggcccacgggcgtgaattttctgctccagcaggccgagcgccattgcaaagccgtacagcgtggcggcaggcgttggcgggcagccagggatataaacatccacagggacaattttatccgtaccgccccacacgcagtagagatcgtggaagatcccgccactgttaccgcaggcaccgtaggagatacaaattttcgggtccggcgcggactgccacgcacgcagcgcaggggatcgcattgcacgggtgaccgcgccggtaaacagtaaaatatccgcatgacgcggactaggaacgactttaatgccgaagcgttctgcatcaaacagcgggctaagcgtggcgaaaatttcgatttcgcaaccgttgcagccgccgcagtccacgcggtaaacataggcagaacgtttgatttttttcagtaagctcgccttcatgctggcgatggattcatccaccgtcatggggaccggaatgccgttggcgtcacgggggcctaataaattgctcatcagatggcctctttcatatggcgagtcagttcaatacggtcggacggcaccaggcatttctggcgcttacattccgggcaagtctcaaagctttcgcggtggttttccgcgcggctgtcgccgttgtgcttaagcagcgcaatggcgtagtcgatctctttctggacggcgaaaggacgattgcagacgcggcagttgcacagcgcgaagcgggactgttgcaggaagtcttctttcttccacaccgccagttcgtactcttggctcagtttgatcgccgccgtcgggcagacttcttcgcagcgtccacagaagatgcagtgcccaagattaaactcccaggcaagctctcctgtggcgaggtcagtttcaaccgttaaggcgttactcgggcaggcattgacgcaggccgcgcagccgatgcactgctgcgggttctgctctggcttaccacggaagtttttatcaaccgcaatcggctccagcggataagagctggtcgccgtgccggttttgatgacttttttgataaaggtaaacatggcgattccttatttcagcgggctgtttttacgctcaatgctgtaacgctcgagttctttgtacggcaccactttgctcttcttcttacgcacatcgaccacggtcatgcggtcggtacaggagtagcaagggtcgaggctaccgataatcagcggcgcatcggaaacggtgttgccgcgcagcatgtagcgcagggtcggccagttcgcgtaggtcgcggcacggcagcgccagcggtacagcttctggttgtcgccggtcatgctccagtggatatcatcgccgcgcggcgcttcggcaaagcccagcgcaaagcggtgcggaatgtaggtaaagccttccaccatcagtgggccacccggcaggttatccagaccgtagtcgatcatgttcagcgcggtatagacttcgttgatacgcactttcagacgggaaataacgtcgcagccctgctcgctgtggacttccattggcagcaggccatagccgacaaacgggtgatcggcgcgggtatcacgggcgtgaccgctggcacggaccatcgggccgacgttactgaagtcgcgagcgatttccgggtccagacgaccaatgccgacagtgcgctgttccatgttcggagtgctcagcagcacatccaccagctcctgcacttcacgacgcatctgttgtgccagctggcgggtctggatcatgtcgtctttcagcagatcgcgacgaatcccgccgatcaagttcaggccgtaggttttacgcgcaccggtaaggatctctgccattttcatggaggtttcacgcacgcggaagaactgcataaagccggagtcgaagccggtaaagtgacaggccaggccaaggttgagcagatggctgtgcaagcgttctacctccagcagaatggcgcggatcatctgcgcacgttctggcacctgaatacccatcgcgttttccacgctcgtggtgtaggcggtgctgtgggcaaagccgcagatcccgcacacacggtcagagaggaaggtcacttcgttataacccatacgggtttccgccagtttttccatgccgcgatggacgtagaacagacggtagtcggcgtcgataatgttttcgccatcgacgaacagacggaagtggcccggttcatcagaagtgacgtgcagcggaccaatcggcacgacgttgtttttcttgtcgcccagttcgttgatgaactcgtaggtttcagcatcggtggtcggtgccggacgctgacgataatccatgctgtctttacgcagcggataaagttcatccggccagtcatccggcagcaccagacgacgttcatccggcagaccaaccggaatcaaaccgtacatatcgcgcacttcacgctcgccccacaccgccgccggaacgcgcggcgtcacggacggatattccggtttgttggcgtcaacttcgacgcgaaccgtaatccaacacttagtgcccttctccatgctcagcacgtagtaaacggcgtaatgaccattcagtttgcgttcgtcgttaccaaacagcacgctcagccagccaccctgtttgtagtaaagaaactccaccacttccggcaggtagttcacctttacggtgacagtcagctgatctttggtctgccaggcgtggtccagcacgacgcccggaaatgcctcattcagcgcggcgagataatgttgacctaatttttcttcagacatgctcaaactctctttaatcacgccgccagcaaggagacgaacgctaaaaatgcaaagccaaacccagcccaggtaatgcgcggagtaatatcaagacgcagacgggccatgctgttttcgaacagcgcgataaccaggacgccgaccaccagttttacgatggcaatcaccagcgccagcagcagtccaccggcggtgaaggtttccatttgtccccacggaataaacaccccgacgaacatctgcaacaccaccagctgtttcaggctgataccccatttcatgacgccaaagccgctgccgctgtattcagagagcgggccttcctgcagctcctgctcggcttccgccaggtcgaacggcagtttgcccatttcgataaaggtggcgaacgcacaggcacaaagcgccagtaccagcgggatgctctggctcagcggccagtgataaacggtgtcggtgatgttgctgatgttggtggaaccggcaacctgtgcggcaacccacagaccaagcagcagcatcggttcgaccagcacgccaagcatcgcttcacggctcgcgccgatagcggtaaacgggctaccggtatccagaccagaaatggcaaagaagaaacgcgcgatggcaaagagatacagtaaggtgatcaaatcacccagttgcggcagcggagaaccgacggtcaccaccggcagcgcagtagcgatagtcagcatgacgcccaccatcacatacggcgtcaggcggaacacccagccggaggcatccgggccgacgctctgacgccccagcagtttgataatgtcgcgatactcctgcaacacgcccggcccgcgacggttatgcaagcgggcgcgcgccacgcgggttataccggagagcagcggcgcaacggcaaataacaccagcgcctgaattaacggatataaaacactcattctcaggctcctcgactaacaataatcaccaccagtaccgccagttcaaccagcgccatccggcggaacagcaacgcactcccctcgcactgccagcccggcaccagagacaccggattcagccatttgcgtagtttcagcaccggcgcaaacgcctgtttcaccggcatggcaaaaccgtgagcggtaatcaccatacttttttcgtggtcgtaaccgcacacccaggccgcaccgcgggaacggcttggcaaacgatcgcctttgcaaatcgccataatgatgaatggcagcagcgggcaggcaatcagcagcaacgtgatcatcggttgagaaacggtggtgttagcaggctccagcggcagaggtacagcagcagagagcatcggcagtagccacggcgcagcaacaccgccaattacgcagcaaatcgccagtgccactacgcttacgctcatcaggagcggcgcacaggtggcgttttcggcttctttggtgcgcggcgcgccgaggaacgtgacgccatagactttcgccatacacatcaccgccagcgcaccggtaattgccagccccacagcgagcagcggccccagcagacgggcaacaaacgcgccactattgctcagtttgaaaaaactttgatagataacccattccccggcaaaaccattcagcggcggcagcgcagccattgccatcagcccgactaacatggcgatggagataaccggcattttcttgccaataccaccgagtttttcgatatcgcgatgaccggtacggaaccagacgctccccgccccgaggaacagtacgcttttgaacaggctatggttaagcagatggtacagaccaccgaccaggccaagagcaatcagcgccggttgttcgagcgcgatacccgttacgccagcgcccagccccagcaggatgatgccgatattttccagggtgtggtaagccagcaggcgctggatgttgtgctccaccagcgcatacagaccaccgacaaacgcggtgatcatgccgagcaccagcagcgcgatcccccaccacagcggtgcattaccgcccagcagactcagggttaaaatgcccagcaggccaattttcatgactaccgtagaaaacaacgcggcagctggcgcagaggcgttcgcatgtgcctgcggcacccagccgtgcagcggaataatcccggccagcaggccaaagccaatcactccgagcagccagatatcggaaccgagcggcagctgttgcatacgcatatccagcaggcgcagatccagcgtgccgtaacgctgccacagcagccagcaagcaatcgccagcagcagagtgccaagacgccccagcgcaaaccacagtttgccctctttgctgttgctggtgaggaacaccgcgcacagggccatgatttcggccattaccacgaacatgccgaggttgctggcaatgacggcgcagacggcggcagccatcaacatattgatctgcaagccgttgcacttcacctgcgcgtggcgatgccagtcaatgttgtagaggctgacaaacagaccgcacagaccgagcgtaatcagccaaatcgcgttaagcggagagatttgcacatcgtagcttaccaggctcagcgcaccgctcacgccaaccgcgccagtcagtacagtgaagcccgcggctgccgtatacagactaccaaccgcgccgccaattccagctatccagccacttaacgctttttgaaaagaaaagagaaatgccagaacagcggcggcgacaaaccacgccacgccgctattgatcagggaaattgcgctcatttagcctctccactttgagcctgctgaaacaaggtgagatcgccaaagtccgtgttaaaggtcagctcacgcttacgtttgctgacgcgggcgatatcggtgttatccaccagatgcagggctttagtcgggcacatccgcacgcaggccggaccttgttcatcaaagctacaaaggtcacatttgacggcgatcgcgcgaatacctggcacccagtcaagcaatgtgctgacacgcgccggagcaggcggtgccggtggcgctttcggggtattggcgtttgccggaatatccagcggacggctgccggaaaattcaattgcgccaaacgggcaggcgatgccgcacagcttgcagcttacgcacaggctttcattcaactgcacggccccatcgacgcgggtgatggcgttaaccgggcagaccaccgcgcagggtgcatcttcacagtggtgacagagctgcggcgcagattctttttcattcagcatcactctcaggcgcggcatactttgcaggccgtgctggcgatgcgtctcactacaggcggcctcacaagtgtggcagccgatacagagcgtggagtcagcaattacaaaacgattcaccaggcattcctcaggtgattgtcatttttgacgaaaacatgccgatgaaatgtcattttcgacactcatcgacacgcccatccccaaacaggcgtaacgcctgcaaaacgggcaaagcctcagctcatgctgccgggctttgtccctttaccagttggcttaaattcaccggcacattgttttcaatagcggtgtataagctgtcgtaaacgccagcgattttttcgagatagtgttccagaacctgttcgcgatcgcggatgttgaccttgccatcaatcatgccgtcaatgctcagttgcgcctgcgcaatccgctgtttgtcttcgccatcttttgtttcgacgtaatactcgatggtgtggctgttaaagccatccgccagggtgacgtaaatgcgaaaatgttcaaaaaggacgaaacagagttctttgtccggcgcgcagctcatggcgtgatgcaggcgcgctttgcttaacgtgatcccctgaaccaggctattgcagtagatgtgccactggtcctgtaggcgacgatgccgctgtgcgatgtaatcggctttctcgcttatttcccaaatagtcattgtcaggttacccgtttaacagagatgccagctttaagcattttttgtgccaacttttaatttattgttattaaagagatttttaagctaaagatgaatttcgtcgccgtgtcgacgtgtcatttcgacatcatcgacattattcaccgcagggataatcaacactggcacaattattgcttgtagctggcaatagttaatgggaggcgatatgcacgaaataaccctctgccaacgggcactggaattgatcgaacagcaggccgcaaaacacggcgcaaaacgcgtaactggggtctggctcaaaattggcgcattttcttgtgtcgaaaccagctctcttgccttttgttttgatctggtttgccgcggcagcgtggcggaaggttgtaaactgcacctcgaagaacaagaggccgaatgctggtgtgaaacatgccaacagtatgtgacgctactgacccagcgcgtccgccgctgtccacagtgtcatggtgacatgctgcagattgtggcagacgacggtttacagattcggcggatagaaatagaccaggagtgagcgatgtgtacaacatgcggttgcggtgaaggcaacctgtatatcgagggtgatgaacataaccctcattccgcgtttcgtagcgcgccatttgccccggcggcacgcccgaagatgaaaatcaccggcattaaagcgcctgaatttacccccagccagactgaagaaggcgacctgcattacggtcatggcgaagcgggcactcacgcaccgggcatgagccagcgtcggatgctggaagtcgaaattgacgtgctggacaaaaataaccgtctggctgaacgcaaccgcgcgcgctttgctgcccgcaagcaactggtgctcaacctggtttccagccctggttccggtaaaaccaccctgctgacggaaaccctaatgcgcctgaaagacagcgttccgtgcgcagttattgaaggcgaccagcaaaccgtgaacgatgccgcacgcattcgcgctaccggcacaccagcgattcaggtgaacaccggtaaaggctgccatcttgacgcacagatgattgccgacgccgcaccgcgtctgccactggacgataacggtattctgtttatcgaaaacgttggcaacctcgtatgcccggccagcttcgatctcggtgaaaaacacaaagtggcggtgctttccgttaccgaaggtgaagacaaaccactgaaatatccgcatatgtttgccgccgccagcctgatgctgctcaacaaagttgacctgttgccgtatctcaactttgacgttgaaaagtgcatcgcctgcgcccgcgaagtcaatccagaaattgaaatcatccttatttccgccaccagcggcgaagggatggaccagtggctgaactggctggagacacagcgatgtgcataaggtaaaactggctggagacacagcgatgtgcataggcgttcccggccagatccgcaccattgacggcaaccaggcgaaagtcgacgtctgcggcattcagcgcgatgtcgatttaacgttagtcggcagctgcgatgaaaacggtcagccgcgcgtgggccagtgggtactggtacacgttggctttgccatgagcgtaattaatgaagccgaagcacgcgacactctcgacgccttacaaaacatgtttgacgttgagccggatgtcggcgcgctgttgtatggcgaggaaaaataatgcgttttgttgatgaatatcgcgcgccggaacaggtgatgcagttaattgagcatctgcgcgaacgtgctagtcatctctcttacaccgccgaacgccctctgcggattatggaagtgtgtggcggtcatacccacgctatctttaaattcggcctcgaccagttactgccggaaaacgttgagtttatccacggtccggggtgcccggtgtgcgtactgccgatgggtagaatcgacacctgcgtggagattgccagccatccggaagtcatcttctgtacctttggcgacgccatgcgcgtgccggggaaacagggaagcctgttgcaggcaaaagcacgcggtgccgatgtgcgcatcgtttacagcccgatggatgcgttgaaactggcgcaggagaatccaacccgcaaagtggtgttcttcggcttaggttttgaaaccactatgccgaccaccgctatcactctgcaacaggcgaaagcgcgtgatgtgcagaatttttacttcttctgccagcacattacgcttatcccgacgttgcgcagtttgctggaacagccggataacggtatcgatgcgttcctcgcgccgggtcacgtcagtatggttatcggcaccgacgcctataattttatcgccagcgattttcatcgtccgctggtggttgctggattcgaaccccttgatctactacaaggcgtggtcatgctggtgcagcagaaaatagcggcccacagcaaggtagagaatcagtatcgtcgagtggtaccggatgccggtaacctgctggcgcaacaggcgattgccgatgtgttctgtgtcaacggcgacagcgaatggcgcggcttaggcgtgattgaatcttctggcgtgcacctgacgccggattatcaacgattcgatgccgaagcacatttccgcccggcaccgcagcaggtctgcgatgacccgcgcgcgcgttgtggtgaggtattaacgggcaaatgtaagccgcatcaatgcccgctgtttggtaacacctgtaatcctcaaaccgcgtttggtgcgctgatggtttcctccgaaggagcgtgcgccgcgtggtatcagtatcgtcagcaggagagtgaagcgtgaataatatccaactcgcccacggtagcggcggccaggcgatgcagcaattaatcaacagcctgtttatggaagcctttgccaacccgtggctggcagagcaggaagatcaggcacgtcttgatctggcgcagctggtagcggaaggcgaccgtctggcgttctccaccgacagttacgttattgacccgctgttcttccctggcggtaatatcggcaagctggcgatttgcggcacagccaatgacgttgcggtcagtggcgctattccgcgctatctctcctgtggctttatcctcgaagaaggattgccgatggagacactgaaagccgtagtgaccagcatggcagaaaccgcccgcgcggcaggcattgccatcgttactggcgatactaaagtggtgcagcgcggcgcggtagataaactgtttatcaacaccgctggcatgggcgcaattccggcgaatattcactggggcgcacagacgctaaccgcaggcgatgtattgctggtgagcggtacactcggcgaccacggggcgactatccttaacctgcgtgagcagctggggctggatggcgaactggtcagcgactgcgcggtgctgacgccgcttattcagacgctgcgtgacattcccggcgtgaaagcgctgcgtgatgccacccgtggtggtgtaaacgcggtggttcatgagttcgcggcagcctgcggttgtggtattgaacttagtgaagcggcactgcctgttaaacctgccgtgcgtggcgtttgcgaattgctgggactggacgccctgaactttgccaacgaaggcaaactagtaatagctgttgaacgcaacgcggcagagcaagtgctggcagcgttacattcccatccactggggaaagacgcggcgctgattggtgaagtggtggaacgtaaaggtgttcgtcttgccggtctgtatggcgtgaaacgaaccctcgatttaccacacgccgaaccgcttccgcgtatatgctaataaaattctaaatctcctatagttagtcaatgaccttttgcaccgctttgcggtgctttcctggaagaacaaaatgagttatacaccgatgagtgatctcggacaacaagggttgttcgacatcactcggacactattgcagcagcccgatctggccagcctgtgtgaggctcttagccaactggtaaagcgttctgcgctcgccgacaacgcggctattgtgttgtggcaagcgcagactcaacgtgcgtcttattacgcgagccgtgaaaaagacacccccattaaatatgaagacgaaactgttctggcacacggtccggtacgcagcattttgagccgccctgatacgctgcattgcagttacgaagaattttgtgaaacctggccgcagctggacgcaggtgggctatacccaaaatttggtcactattgcctgatgccactggcggcggaagggcatatttttggtggctgtgaatttattcgttatgacgatcgcccctggagcgaaaaagagttcaatcgtctgcaaacatttacgcagatcgtttctgtcgtcaccgaacaaatccagagccgcgtcgttaacaatgtcgactatgagttgttatgccgggaacgcgataacttccgcatcctggtcgccatcaccaacgcggtgctttcccgcctggatatggacgaactggtcagcgaagtcgccaaagaaatccattactatttcgacattgacgatatcagtatcgtcttacgcagccaccgtaaaaacaaactcaacatctactccactcactatcttgataaacagcatcccgcccacgaacagagcgaagtcgatgaagccggaaccctcaccgaacgcgtgttcaaaagtaaagagatgctgctgatcaatctccacgagcgggacgatttagccccctatgaacgcatgttgttcgacacctggggcaaccagattcaaaccttgtgcctgttaccgctgatgtctggcgacaccatgctgggcgtgctgaaactggcgcaatgcgaagagaaagtgtttaccactaccaatctgaatttactgcgccagattgccgaacgtgtggcaatcgctgtcgataacgccctcgcctatcaggaaatccatcgtctgaaagaacggctggttgatgaaaacctcgccctgaccgagcagctcaacaatgttgatagtgaatttggcgagattattggccgcagcgaagccatgtacagcgtgcttaaacaagttgaaatggtggcgcaaagtgacagtaccgtgctgatcctcggtgaaactggcacgggtaaagagctgattgcccgtgcgatccataatctcagtgggcgtaataatcgccgcatggtcaaaatgaactgcgcggcgatgcctgccggattgctggaaagcgatctgtttggtcatgagcgtggggcttttaccggtgccagcgcccagcgtatcggtcgttttgaactggcggataaaagctccctgttcctcgacgaagtgggcgatatgccactggagttacagccgaagttgctgcgtgtattgcaggaacaggagtttgaacgtctcggcagcaacaaaatcattcagacggacgtgcgtctaatcgccgcgactaaccgcgatctgaaaaaaatggtcgccgaccgtgagttccgtagcgatctctattaccgcctgaacgtattcccgattcacctgccgccactacgcgagcgtccggaagatattccgctgctggcgaaagcctttaccttcaaaattgcccgtcgtctggggcgcaatatcgacagcattcctgccgagacgctgcgcaccttgagcaacatggagtggccgggtaacgtacgcgaactggaaaacgtcattgagcgcgcggtattgctaacacgcggtaacgtgctgcagctgagtttgccagatattgttttaccggaacctgaaacgccgcctgccgcaacggttgtcgccctggagggcgaagatgaatatcagttgattgtgcgcgtgctgaaagaaaccaacggcgtggttgccgggcctaaaggcgctgcgcaacgtctggggctgaaacgcacgaccctgctgagtcggatgaagcggctgggaattgataaaagcgcattgatttaactgcaaattgccggacagatctgcctgtccggcatattattcatgaggttttttcggacgatatttttccggcagttctggcaccggacgcttgtcatcgatgagatgacgcacggttaagatcggatgacgccacagcattctcggcccggcccaacgcataatctgtttcatctcttcacgctttgcaggctggtaacagtgcaccggacactgcttacaggctggtttctcttcgccgaacacacatttatccagccgcttttgcgcgtaaacaaacaacgcctcgtaatgctccggctccgcactcgcctgcgggcatttcgcttgataaagatcgatcatttttttaatcgtcagtttttcacgagagatacgcttgccggacatgctgcctccacctcattaagatgtatttatattacatcttaatcttaaagggcactatgactccaaagaagaagggttagccaaccgatacaattttgcgtacttgcttcataagcatcacgcaaaagctgcaaaacagcatctttcccggaaccagcatcaagaactcgccgttcgcttcttcccctgaaatgattaactccggtatcatgtgcgccttatgtgattacaacgaaaataaaaaccatcacaccccatttaatatcagggaaccggacataaccccatgagtgcaatagaaaatttcgacgcccatacgcccatgatgcagcagtatctcaggctgaaagcccagcatcccgagatcctgctgttttaccggatgggtgatttttatgaactgttttatgacgacgcaaaacgcgcgagccaactgctggatattagtctgaccaaacgcggtgctagcgcgggagagccgatcccgatggcggggattccctaccatgcggtggaaaactatctcgccaaactggtgaatcagggagagtccgttgccatctgcgaacaaattggcgatccggcgaccagcaaaggtccggttgagcgcaaagttgtgcgtatcgttacgccaggcaccatcagcgatgaagccctgttgcaggagcgtcaggacaacctgctggcggctatctggcaggacagcaaaggtttcggctacgcgacgctggatatcagttccgggcgttttcgcctgagcgaaccggctgaccgcgaaacgatggcggcagaactgcaacgcactaatcctgcggaactgctgtatgcagaagattttgctgaaatgagcttaattgaaggccgtcgcggcctgcgccgtcgcccgctgtgggagtttgaaatcgacaccgcgcgccagcagttgaatctgcaatttgggacccgcgatctggtcggttttggcgtcgagaacgcgccgcgcggactttgtgctgccggttgtctgttgcagtatgcgaaagatacccaacgtacgactctgccgcatattcgttccatcaccatggaacgtgagcaggacagcatcattatggatgccgcgacgcgtcgtaatctggaaatcacccagaacctggcgggtggtgcggaaaatacgctggcttctgtgctcgactgcaccgtcacgccgatgggcagccgtatgctgaaacgctggctgcatatgccagtgcgcgatacccgcgtgttgcttgagcgccagcaaactattggcgcattgcaggatttcaccgccgggctacagccggtactgcgtcaggtcggcgacctggaacgtattctggcacgtctggctttacgaactgctcgcccacgcgatctggcccgtatgcgccacgctttccagcaactgccggagctgcgtgcgcagttagaaactgtcgatagtgcaccggtacaggcgctacgtgagaagatgggcgagtttgccgagctgcgcgatctgctggagcgagcaatcatcgacacaccgccggtgctggtacgcgacggtggtgttatcgcaagcggctataacgaagagctggatgagtggcgcgcgctggctgacggcgcgaccgattatctggagcgtctggaagtccgcgagcgtgaacgtaccggcctggacacgctgaaagttggctttaatgcggtgcacggctactacattcaaatcagccgtgggcaaagccatctggcacccatcaactacatgcgtcgccagacgctgaaaaacgccgagcgctacatcattccagagctaaaagagtacgaagataaagttctcaccagtaaaggcaaagcactggcactggaaaaacagctttatgaagagctgttcgacctgctgttgccgcatctggaagcgttgcaacagagcgcgagcgcgctggcggaactcgacgtgctggttaacctggcggaacgggcctataccctgaactacacctgcccgaccttcattgataaaccgggcattcgcattaccgaaggtcgccatccggtagttgaacaagtactgaatgagccatttatcgccaacccgctgaatctgagcccgcagcgccgcatgttgatcatcaccggtccgaacatgggcggtaaaagtacctatatgcgccagaccgcactgattgcgctgatggcctacatcggcagctatgtaccggcacaaaaagtcgagattggacctatcgatcgcatctttacccgcgtaggcgcggcagatgacctggcgtccgggcgcagtacctttatggtggagatgactgaaaccgccaatattttacataacgccaccgaatacagtctggtgttaatggatgagatcgggcgtggaacgtccacctacgatggtctgagcctggcgtgggcgtgcgcggaaaatctggcgaataagattaaggcattgacgttatttgctacccactatttcgagctgacccagttaccggagaaaatggaaggcgtcgctaacgtgcatctcgatgcactggagcacggcgacaccattgcctttatgcacagcgtgcaggatggcgcggcgagcaaaagctacggcctggcggttgcagctctggcaggcgtgccaaaagaggttattaagcgcgcacggcaaaagctgcgtgagctggaaagcattagcccgaacgccgccgctacgcaagtggatggtacgcaaatgtctttgctgagtgtaccagaagaaactagccctgcggtcgaagctctggaaaatcttgatccggatagtctcaccccgcgtcaggcgctggagtggatttatcgcttgaagagcctggtgtaataacaattcccgatagtcttttgctatcgggaatattaacgacaactgacgaataaaataaaaacaccctgtataataggaaagcttattttacagggtaaaaccatgccatctacacgctatcaaaaaatcaatgcccatcactatcgccatatatgggtcgttggtgatattcatggtgaatatcagttattacaatcccgcttacatcaactctcttttttccccaaaatcgacttacttatttctgtcggcgataatattgatcgtggaccggagagtcttgacgtcctgcgcctgctaaaccaaccctggtttacgagcgttaaaggcaaccacgaagcgatggcgcttgaggcattcgaaactggcgatggcaatatgtggcttgccagcggtggtgactggtttttcgatttaaatgatagtgagcaacaagaggcaatagatctgttgctgaaattccatcaccttccacatattattgaaatcactaacgacaacataaaatatgccatcgcacatgcagattatccggggagtgaatatctctttggtaaagaaatagcggagagcgaattactctggcctgttgatcgtgtgcagaaaagccttaatggcgagttacaacaaataaacggcgctgattattttatatttggacatatgatgtttgataacattcagacgttcgctaaccagatttatattgataccggaagcccgaacagcgggcggctgagtttttataaaataaagtaatctcatgcttcttctgtgaagcatgagtaacccggtgttattgcaggccattattcatttttcgctaccagcaaagagagatcctgcttcaccagcgcgcgactggcactctccggcaaaccgtcgtctgtaataatctgatcaaactcgcttaatggtaacgccagccatgtcgccacctgaccatatttcgtcgcatcacagaccaaaactcgctggcggctggcactggcaatcgcccgtttcaccgtgactttatcttccgctggcgtagaaatcccccgcacactccaactgcttgcagaaataaaagcctgatcaatcatcaggctgcgcagcatggtcgcagcggcttccccgacacaggaacggttttcccgacacactgcaccgccagtgtgaataattgtgcaattactgttgtcgagcaagtagtccgcaataacgaaatcgtttgtgaccacagtcagactctccatgtgaatcagatgctgtgctatcgctaacgtggtcgttcccgcatccagatagatacaacttcccggctgaacaagacttgccgccagcttgccaatagccgctttttgcgtcattgccagcgcagtttttacctgatgagaaggttcatgcgccacgcgtcccggagactggacgcctccggacaccagcacaacggctccctgctgctccagtttttgtaaatcccgacgaatggtcatatgactcacattcattctgtccgttagttcagcaatactgacaatgcctttttcagctaccatctcaaggatgatttggcgacgctctacgggtatcaacttttgctccttcctttgtcctgcactcattctacgctatttgcctgcgaaacgtgcgcggcgcaactaacgcttagttcacataaaataacacacaatgttaatttatgtgaatcagatcaccataccgttatcttccagcgcttatattcacaatatcaaacaaaatatcacttaaattaacaaggagagcagatgaaaacgggatctgagtttcatgtcggtatcgttggcttagggagtatgggaatgggagcagcactgagttatgtccgcgcaggtctttctacctggggcgcagacctgaacagcaatgcctgcgctacgttgaaagaggcaggtgcttgcggggtttctgataacgccgcgacgtttgccgaaaaactggacgcactgctggtgctggtggtcaatgcggcccaggttaaacaggtgctgtttggtgaaacaggcgttgcacaacatctgaaacccggtacggcagtaatggtttcttccactatcgctagtgctgatgcgcaagaaattgctaccgctctggctggattcgatctggaaatgctggatgcgccagtttctggtggtgcagtaaaagccgctaacggtgaaatgactgtcatggcctccggtagcgatattgcctttgaacgactggcacccgtgctggaagccgttgccggaaaagtttatcgcataggtgcagaaccgggactaggtagcaccgtaaaaattattcaccagttgttagcgggcgtacatattgctgccggagccgaagcgatggcacttgcagcccgtgcggggatcccgctggatgtgatgtatgacgtcgtgaccaatgccgccggaaattcctggatgttcgaaaaccggatgcgtcatgtggtggatggcgattacaccccgcatagtgccgtcgatatttttgttaaggatcttggtctggttgccgatacagccaaagccctgcacttcccgctgccattggccagtacagcattgaatatgttcaccagcgccagtaacgcgggttacgggaaagaagacgatagcgcagttatcaagattttctctggcatcactctaccgggagcgaaaagttgagctaaactctaccgggagcgaaatcatgatcaagattggcgttatcgccgatgattttaccggcgcgacggatatcgccagttttctggtggaaaacggtctaccaacggtacaaattaacggtgttccaacaggtaaaatgccggaagcaatcgacgcactggtgatcagcctgaaaacgcgctcctgtccagtggttgaagccacacagcaaagcctggcggctctgagctggttgcaacagcaaggttgcaaacagatctatttcaaatactgctctactttcgacagtacggcgaaaggtaatattggcccggttaccgatgccttaatggatgctctcgacacgccgtttacggtcttctctccggccctgccggtcaacggacgtacggtttatcaggggtatttgttcgtaatgaatcaactgctggccgaatccgggatgcgccatcacccggtaaatcccatgaccgacagctatcttccccgtctggttgaagcgcaatccacagggcgctgcggcgtcgttagcgcacatgttttcgaacaaggtgtggatgccgttcgtcaagagctggctcgcttacagcaagagggctaccgctacgcggtgcttgatgcgctgaccgaacaccatctggaaattcagggagaagccttgcgcgatgccccactggtaacgggcggttctggtctggcgattggcctggcccggcagtgggcgcaagaaaacggtaaccaggctcgcaaagcagggcgtccgctcgctgggcgcggcgtagtgctctccggtagttgctctcaaatgaccaaccgccaggtagcacattaccgtcaaattgcaccagcccgtgaagttgatgtggcacgctgcctcagtattgaaactctggccgcttatgcacacgaactggcagagtgggttctgggccaggaaagtgtacttgctccactggtttttgccaccgccagcactgacgcattggcagcaattcaacagcaatacggtgcacaaaaagccagtcaggcagtagaaacactgttttctcaactagcggcgcggttagcagcggaaggcgtgacacgctttattgtcgcaggcggtgagacctccggcgtagtcacacagagcctgggaataaaagggtttcatattggcccaaccatttccccggcgtgccgtgggtaaacgcactggataagcctgtctcactcgcccttaaatctggcaacttcggtgatgacgcctttttttcacgagcccaaagagagtttttatcatgagcgatttcgcaaaagtagagcagtctttgcgagaggagatgacgcggattgccagtagtttctttcagcgcggctatgcaaccggtagcgctggcaatctgagcctgcttttacctgacgggaatttactggcgacaccgacaggtagttgcctgggcaatctcgatccgcagcggctttccaaagtcgccgcggatggcgaatggttaagtggtgacaaacccagcaaagaggtgctctttcatctggcgctgtatcgcaacaatccgcgctgtaaagcggtggtgcatttgcacagcacatggagcacggcgctttcctgcctgcaagggctggacagcagcaacgttattcgtccgttcacaccatacgtggtgatgcggatgggaaatgtcccgctggtgccttattaccgaccgggcgataaacgcatcgcacaggatctggcggaactggcagcagacaatcaggcttttttactggcaaatcatggcccagtggtttgcggtgaaagcctgcaagaagccgccaacaatatggaagagctggaggaaacggcaaagctgatttttattctcggtgaccgcccgatccgttatctgaccgcaggtgaaattgcggaattaaggagttaatgcaatgcctcgttttgcagctaatttatccatgatgttcaccgaagtgccttttattgaacgcttcgccgcagcgcgaaaagccgggttcgatgctgtggaatttctgtttccctataactactccaccctgcaaatccaaaagcaactggagcaaaaccatctgacactggcgctgttcaataccgctcccggagatattaatgcgggggaatggggattatccgcccttcccggacgtgagcacgaagcacacgcagacatcgacctggcactggaatatgcattggcgctcaattgtgaacaagtccatgtgatggcaggcgtcgtgcccgctggcgaagatgctgaacggtaccgggcagtatttatcgataatatccgctacgctgccgaccgctttgcgccacacggcaagcgaatattagttgaagcactcagccccggcgttaagcctcattatctcttctccagccagtatcaggcactggctattgttgaagaggttgcgcgagataacgtgtttattcaactagatacttttcatgcgcaaaaagtagatggcaacctgacgcatttaatccgcgactacgccgggaaatatgcgcacgtacaaattgccggactacctgatcgacatgaaccggacgatggagaaatcaactatccgtggctgttccgcctgttcgatgaggtgggatatcagggctggatcggttgtgaatataaacctcgtggcctcaccgaagaagggcttggctggtttgacgcctggcgctaattcgttaaatccctaattacaacgtacccatacatccccccatctacggatggggtaggttaactataactttcagacagggtttcccatgtccacaattacattgttatgcattgcgttagctggcgtaatcatgctgttgctgctggtcatcaaggcaaaggtacaaccattcgttgctttgctcctcgtcagcctgttagtcgcacttgcggcaggtataccggcgggcgaagtgggtaaagtgatgatcgccgggatgggcggtgtgcttggttccgtcactattattattggtctgggcgctatgctggggcgtatgatcgaacactctggtggtgcagagagtctggctaattatttcagtcgcaagttaggtgacaaacgaactatcgctgcgctgactctggcagcgttcttcctcggtattcccgtcttctttgatgtcggctttattattcttgcgccaatcatttacggttttgccaaggttgccaaaataagcccactcaaatttggcctgcctgtcgctgggatcatgctcactgttcacgtggcggtaccgccgcatccaggccctgtcgccgcagcggggttactccacgcagacatcggctggctaaccatcatcggtattgcgatttctattcccgtaggggttgttggctactttgcagcgaaaataatcaataagcgccaatatgcgatgagtgtagaagtactggaacagatgcaactggctccggccagtgaggaaggcgcgacaaaattaagcgataaaataaatccaccgggcgtcgcgctggtcaccagcctaattgttattcctatcgcgattatcatggcgggtacggtttccgcaacactgatgccgcctagccatcccctgcttggtacgctacagctgatcggcagtccaatggtagctctaatgattgcgctggtgctggcattctggttattggctttacgtcgcggctggagcttacaacacaccagcgacattatgggcagtgcgcttcctactgcggcggtagtgattttggttactggtgctggaggggtatttggcaaagtgctggtggaaagcggcgtcggcaaagcccttgccaacatgctacaaatgattgacctgcctctgttaccagccgcatttattattagtctggcgctgcgtgcaagccaggggagtgcaaccgtagcaatactgacaaccggcgggttactcagtgaagcggtgatgggattgaatccgattcagtgcgtattggtgacgctggcagcctgctttggtgggcttggtgcgagtcatattaatgacagtgggttctggattgtgaccaaatatctggggttgagcgtagcagacggtctgaaaacctggacagtgttaacgaccattctcggttttaccggattcttaattacctggtgcgtatgggcggtaatttgaccttaataaaaaggtccgatgggcatcggaccttttattgtgcacagaaaaggccagcctcgcttgagactggcctttctgacagatgcttacttactcgcggaacagcgcttcgatattcagcccctgcgtttgcaggatttcgcgcaaacggcgcaggccttcaacctgaatctggcgaacacgttcacgggtgaggccaatttcacgacctacatcttccagtgttgccgcttcgtaccccagcaaaccgaatcgacgtgccagcacttcacgctgtttggcgttcagctcgaacagccatttgacgatgctctgcttcatatcgtcatcttgcgtggtatcttccggaccgttctctttttcatcggccaggatgtccagcaacgctttttcggaatcaccacccagcggggtgtctacgctggtaatgcgctcgttaagacgaagcatacggctgacgtcatcaactggcttatccagttgctctgcgatctcttccgcacttggttcatggtccagcttatgggacaactcacgtgcggttcgcaggtaaacgttcagctcctttacgatgtgaatcggcaaacgaatagtacgggtttggttcataatcgcccgttcaatcgtctggcgaatccaccaggttgcgtatgtactgaagcggaaaccacgttccgggtcaaacttctctaccgcgcggatcagccccaggttgccctcttcgataaggtccagcaacgccagaccacgattgccataacggcgggcaatttttaccaccagacgcaagttactctcgatcatccggcggcgagaggcgacatctccacgcagtgcgcgacgcgcaaaataaacttcttcttcggccgttaacagtggactataaccaatctcaccaaggtaaagctgagtcgcgtccaacacacgctgtgtggctccctggcttaacagttcctcttcggccaaatcgttatcactgggttcctgttctactaaggccttttcgtcaaaaacctcaactccgttctcatcaaattccgcatcttcatttaaatcatgaactttcagcgtattctgactcataaggtggctcctacccgtgatcccttgacggaacattcaagcaaaagcctggttccgccgatttatcgctgcggcaaataacgcagcgggtttacggatttccccttgtaacgaatttcaaaatgcaagcgtgtactactggttccggtgctacccatggtcgctattttttgccccgccttaacttcttgttgttcccggaccagcattgtgtcgttatgggcgtaggcactcaggtaatcatcattatgtttgatgataatcagattaccgtagccgcgcagcgcgttaccagcataaacaacgcggccatctgcggtcgcgataattgcctgtcctttgctgcctgcgatatcaatccccttgttgcccccctcagaagcgccaaaggtttcgatcactttgccctcagtcggccagcgccaggtggagataggcgtactggtacttgtactgctgacagtcggctcggttgtgcttgctgttggtaccgttacaggcgctgtgaccgtggtcgcagttggcttgttgttcggcaacattttgttagcactctgttcaccgctagactcagaatacgtaattgtcggttggctcgcaacagcaacggtggaattttgtgcaggcttgatcacaactccttgctctgctgcgtcggcctgggtaatggcatttccgccagtgattggcgtaccggaagcattacccacctgcaaggtctgaccaacgttcagcgcgtatggtgcctgaatattgttgcgctgagcaaggtcacggaaatcgttgccagtaatccaggcgatatagaaaagtgtgtcgccttttttcacggtataggtactgccgctataactgcctttcggaatgttcccatactgacggttatagacgatgcgtccgttttccatctgtaccggctgctgagctactggctgcactggctggatttgcggttgttgagtagcctgaatttgtggctgctgcaccggctgaatttgcggttgctgcgctgtagacgtcgtccccattttcggcggcggcgtaatcaacataccagaattagtatttgcaggcgcattgccattaacggagctgaccggtgccggtggattactagtgtcagaacagcctgccagccataggctaaccagactcaaagccgcaatgcggcgaacggtgaattttgggcttcccgcgctcatttatcccccaggaaaaattggttaataaccagtgacataattaccgtgcaaggcaccctactgaacactggaaaagatgttcacgatacgctgacctgcggcaaaataaccaggaaaaatccaggtatttcctcacgttttaagccagctcacccttcactaaagggacaaagcgcacggcctccacggtatcgataataaattcgcctccccgacgacgcacccgtttcaaatactggtgctcctcccctacgggtaagacgagaatcccgccttcgtccagctgcgtcattagcgcagttggaatttccggcggtgccgccgtaacaatgatagcgtcaaacggcgcacgtgcctgccaaccttgccatccatcgccatgacgggtactaacattatgtaaatcaagatttttcaggcggcgacgtgcctgccactgcaagcctttaatccgttcaacgctgcaaacatgctggacaagatgcgccaggattgccgtttgatatccgctaccggtgccaatttccagcacccggctctgcggcgtcagctcgagtaattcggtcattcgcgccaccatatatggctggctaattgtctgcccctgacctatcggcaaagcgatattgtcccaggctttttgttcaaacgcttcatcaacgaatttttcacgcggcacggcggcaagtgcattcagcacctgctcatcctgaataccttgcgcacgtaattgatccagaagtgcttgtacgcgtctgcttaccattgcgtgccaactcccacgctgtttaaccagtcactaaccacatcttgcgcgctatgcgcagttaaatccacatgcagcggcgtgatggagacatagccctcatctaccgcagcaaaatcggtccccggaccagcatcacatttaccgcccggcgggccaatccagtacagcgtattgccgcgcggatcttgctgcgggatcacctgatctgccggatgtcgtgtaccgcagcgcgtcacgcgaatacctttgatttgatccaagggtaaatccggaacgttaatattaagaatacgcccggtgcgcagcggctctttacacagtgcgcgcaaaatactacaggttaccgccgcggcagtgtcgtaatgtttatgcccgtcaaggctgacggcaagcgccggaaaacctaaatgacggccttccatcgcggcggctaccgtaccggaataaataacatcatcccccagattcggcccggcgttaattccggacacaacaatgtccgggcgcggacgcatcagagcattcacgccaagatagacgcaatcggtcggggttcccatttgcacagcaatatcaccattttcaaaggtaaacgtgcgcagggaggattccagtgtcagagaattactagcgccgctgcggttacgatcgggggcgaccacctgaacgtcagcaaactcacgcaaggctttcgccagcgtttgtataccgggtgcatgtaccccgtcatcattactcagcaatatgcgcataatcacctgttgtgttgataagttccctgacaacgctggttgcaaaactacccgccggaagccagaaacggatctctacggtgacgtcatcccaccaattccagcttaattgttgcggatacagcagcatcgctctgcgcgcggcttcaactttttcgcgcaccagtaaagcttgtaattcagtttctgcggcgacagctgcttgttcgaatgccagcgcttcacgctgagttccccattcgccactgcctggcaatgcggcggttatcatcaactctttatcgttgacgcgacgctgtaattccgccagttcttcggtggttgcgacaaaccagctaccacgtccggctaattgtagcgcatcgccgtcaacaacttgattaacgtctgcttttttgaggcgctcagcaacaatctgattaaacaacgcactgcgggctgcgctcaaccaaaaactccgtttattgcgatcgcgcaccggagtattggtttgcgcccagcgctgcgccccctgcaagttgctaccgccaatcccaaaacgttgggcaccgaagtagttcggtacaccttttacgcaaatatcgatcagacgttgttcaacgtcatcgcgattgctcacttcgcgcagaaccagggtaaaggcgttacctttcagcgcgcctaaacgcagcttgcgcttgtgccgcgcatactccagcacctggcagccttccagttgaaaggcgctcagatcgggcatttccttgcccggcacgcgagcgcataaccactgttccgtaacagcatgtttgtctttttgcccagcgaagctgacttcacgggcatgaattttcaggaatttcgccagtgcatccgccacaaaacgggtattgcagccgtttttgaggattctaaccagaatatgctcaccttcaccatcaggctcaaagcccaaatcttccaccaccacaaagtcttccggattggctttcagcagcccggtgccttgcggtttaccgtggaggtaagtgagattatcaaactcaatcattttgttgccttaatgagtagcgccaccgcttcacaggcaatcccttccccacgtccggtaaatcccagtttttccgtagtagtggctttcacgttaacatcatccatatggcagccgagatcttcggcaataaacacgcgcatttgtggaatgtgcggcaacatcttcggtgcctgagcgatgatagtgacatcgacgttgccaagggtataacccttcgcctgaatacgacgccaggcttcgcgtagcagctcgcggctatcggcacctttaaatgccggatcggtatccgggaacagcttgccgatatcccccagcgccgccgcgccaagcaatgcatcggtcaacgcatggagcgccacgtcgccatcagaatgcgccagcaatcctttttcgtaaggaatgcgtacgccaccaatgataattgggccttcaccgccaaaggcatgtacgtcaaaaccgtgtccaattcgcattatgtattctcctgatggatggttcgggtgaggtaaaactcggccagtgccaaatcttccgggcgcgtgactttaatgttatccgcacggccttcgaccaactgaggatggaatccgcaatattccagcgcgctggcttcgtcggtaatagtcgcgccttcatttagagcgcgcgtcagacagtcatgtaacagctcacgagggaaaaattgcggcgtcagcgcgtgccataagccgttgcgatcaacggtatgagcaatggcatttttgcccggttcggcacgtttcatagtatcgcgcactggtgcggcgaggatcccccccgtgcggctggtttcgctcaacgccaacaatcgcgcgaggtcatcctgatgcaaacaaggacgagcggcgtcatgcaccaatacccactgcgcgtcgccagcggctttcagacctgccagcacggaatcggcacgctcatcaccgccatctacaacggtgatttgcggatgattcgccagaggaagttgtgcaaaacggctatcgccaggacttatggcaatgacgacacgtttcacccggggatgcgccagcagcgcatgcacgctgtgttcaagaatggtttgattaccgatactgagatattgcttaggacattccgtttgcattcgacggccaaatccggccgccggaaccacggcgcaaacatccaaatgagtggttgccatgttaattcccgggctgatttatcgattgttttgccccgcagactgtgcgcgcttgctcgcgtcaggcaccagacgataaaaagtttcgcccggcctggtcatgctgagttcattacgcgcacgctcttcgagcgcctcctggccgccattgagatcgtcaatttcggcaaaaagttgatcgtttcgcgctttaagtttcgcgtttgtagcttgctgtgccgccacatcatcattgacgcgggtatagtcatgtataccgttcttaccgaaccacaggctatactgtagccagaccagaatagccagcaacagcagcgttagtttacccatcctgccccctgaaaaacggcatcatcatcccatgcatccgaagacgactctacatcctctgttggggataccgcgacaacgcgggcaaatgtaccacatttgtccattgttacgtatacccagggcgtgcagaacataatctcattattagttacggtttgaattatgaacagaggagacgggaaagtacaaattagcccagtagccacataaacagtgcgccaaacataatgcctactgtcaccagggtgaaaacaatactgtagcgtagctttccgtccatcaaactatgcagcgcaatccccaccactaccgcgacgggcatcagcgccagaaagaaaggccaggtgtagataaagaagaacagcgtgttagagccataaatcaacatcggcatcgccagcgcaaataaccaggagataaaaccgaccacggcaccaggcagactccatgtggtttcttcatcctcagtaaggctgtcgttatttgttagtgtaatgttatggctattacgcatatttgatcctgttactttgacgaaccgggcatggaaacccggtggtgtctcaggatctgataatatcgttctgtctcaacagatctaataattgctgtaccaaatttgttactaattgttcaccattgagatgaatttctgcgctttcaggcgcttcgtaaacggaatctattcccgtaaagttgcgcagttcaccggcacgcgctttcttatataagcctttgggatcgcgggcttcgcaaatcgccagcggcgtatcgacaaacacttcgataaagcgcccttctcctacgcgttcgcgaaccatctggcgttcggcgcggtgtgggctgataaatgcggtcagcaccaccagtccggcttcaaccatcaaattcgccacttcaccgacgcgacggatattctctttacgatcggcatcgctaaaaccgagatcgctgcataatccgtggcgaacattgtcgccatccagcagatacgtactgacgccgagtttatgtaacgcctcctccagcgccccggcgaccgtacttttaccggacccggagaggccggtaaaccacagcactacaccacgatgaccgtggtgtagctcgcgttgttgcacagtgaccggatggctatgccagacgacgttttcgtcatgcagcgccattatttatcccccagcaaatcgcgcgcgccccagtgcggaaagtggcgacgaaccagagcattcaattccagttcgaatgcactgaattcagatggcgcagcagttgcctggctaactggctcgtgcaccataccggcacccacggtcacattgctcaggcgatcgataaaaatcagcccacccgtcaccggattttgttgataacgatctaacaccagcggctcgtcaaaagtgagatccacgaggccgatcccattcagtggcaggttttcaacttcacgctgggtaaggttattaatatcaacctgatagcgaatgccatcaacacgcgcgcgcgtcttcttaccggcaattttgatgtcgtaactctgccctggagaaagcggctgttccgccatccataccacatccacgctcgcgctctgcaccgccggtaacgcttcgtctgccgccagcagcagatcgccacggctgatgtcgatctcatccgtcagcaccagggtgatcgcttctccggcaaaggcttcttcgcgatcaccatcaaaagtcacgatccgcgcgacgttactttccacaccagagggcagcactttgacacgttgcccgacttccacgcgaccggatgccagcgttccggcgtaaccacgaaaatcgagattcgggcgattaacgtactgcaccgggaagcgcattggctgagcatccaccactcgctggatctccacggtttccagcacttcgagcagtgtcggaccgctgtaccacggcatactttcactttggcttgccacgttgtcgccttccagtgcagagagcggcacaaagcggatatccagattacccggcagctgcccggcaaaggtcaaataatcttcacgaatacgggtgaacgtctcttcactgtaatccaccagatccattttgttgatcgccacgaccagatgtttgatccccaacagtgtggagataaaactgtgacgacgggtttgatcgagcacgcctttacgggcatcgatcagtaagatcgccagttcacatgtgcttgcgccagtcgccatattgcgggtgtactgctcgtgccctggggtgtcggcgataataaatttacgcttctcggtagagaaatagcggtaggccacgtcaatggtgatgccctgttcgcgctcagcttgcaggccgtccaccagcagagccagatccagcttttcgccctgggtgccgtgacgcttactgtcgttatgcaggctactgagctgatcttcgtagatttggcgggtatcgtgcagcagacgaccaatcagagtacttttgccgtcatcgacgctaccacaggtcagaaaacgcagcaggcttttatgttgttgcgcaatcatccaggcttcgacgccgccttcattggcgatttgttgtgcaagtgcggtgttcatcttaaaaatacccctgacgttttttcagctccatagaccccgcctggtcgcggtcaatcacgcggccctgacgttcactggtggtggaaaccagcatctcttcgatgatttccggcagtgtttgtgcattactctccaccgcaccggtcagcggccagcagcccagcgtacggaaacgcaccatccgttttttaatcacttcgcccggttgcaggtcgatacggttgtcatcaatcatcatcaacataccgtcgcgttccagaaccggacgttccgcagcgagatatagcggaacaatgtcgatattttccagccagatgtattgccagatatcctgctcggtccagttagagagcgggaagacgcggatgctttcgcctttgttaatttgcccgttgtagttgtgccacagctccgggcgctgatttttcggatcccagcgatggaagcggtcacggaaagagtaaattcgctctttagcgcgggatttctcttcgtcacggcgcgcaccaccgaaggcggcatcaaaaccgtatttgttcagcgcctgtttcaggccttcagttttcataatatcggtatgtttcgcgctgccgtgcacgaatggattaatccccatcgccacgccttccgggtttttatgcaccagcagttcgcagccgtaggctttagcagtacgatcgcggaactcatacatctcgcggaatttccagccggtatcgacatgcagcaacgggaaaggcagcgtacctggataaaacgccttgcgcgccagatgcagcatgacgctggaatctttaccgatagagtagagcatcaccggattactgaattctgccgccacctcgcgaataatgtggatgctttccgcctccagttgccgcaggtgagtaagtcgtatttgatccataaccgttcctttgcaataccgctattttcttgccatcagatgtttcgactatagggagcgtaagagaacgaatgaaattaccaattagaatgagtagttccttaacggaataacgatttggcaaagctaatatcaaaaagtgcttaaggcaccggatttcgggcgtttaggaagatttgaaattgttttagcgcagcggcagtttcatactatggcggtaaaaaaatttgcatggtatttaaggactcactatgttttccgcattgcgccaccgtaccgctgccctggcgctcggcgtatgctttattctccccgtacacgccagcagtcctaaacctggcgattttgctaatactcaggcacgacatattgctactttctttccgggacgcatgaccggaactcctgcagaaatgttatctgccgattatattcgccaacagtttcagcaaatgggttatcgcagtgatattcggacatttaatagtcggtatatttataccgcccgcgataatcgtaagagctggcataacgtgacgggaagtacggtgattgccgctcatgaaggcaaagcgccgcagcagatcatcattatggcgcatctggatacttacgccccgctgagcgatgctgacgccgatgccaatctcggcgggctgacgttacaaggaatggatgataacgccgcaggtttaggtgtcatgctggaattggcagaacgcctgaaaaatacgcctaccgagtatggtattcgatttgtggcgaccagcggcgaagaggaagggaaattaggcgctgagaatttactcaagcggatgagtgacaccgaaaagaaaaatacgctgctggtgattaatctcgataacttaattgttggcgataaattgtatttcaacagcggtgtaaaaacccctgaggcagtaaggaaattaacgcgcgacagggcgctggcaattgcgcgcagtcacggaatagccgcaacgaccaatccgggtttgaataaaaattatccgaaaggcactgggtgttgtaatgacgcagaaatattcgacaaagcgggcattgctgtacttagcgtggaagcgactaactggaatcttgggaataaggatggttatcagcaacgcgcaaaaacacctgccttcccggcgggaaatagctggcatgacgtaagactggataatcaccaacatattgataaggctcttcctggaagaatagaacgtcgctgccgtgacgttatgcggataatgctacctctggtgaaggagttggcgaaggcgtcttgatgggtttgaaaatgggagctgggagttctaccgcagaggcgggggaactccaagtgatatccatcatcgcatccagtgcgcccggtttatccccgctgatgcggggaacaccagcgtcaggcgtgaaatctcaccgtcgttgccggtttatccctgctggcgcggggaactctcggttcaggcgttgcaaacctggctaccgggcggtttatccccgctaacgcggggaactcgtagtccatcattccacctatgtctgaactcccggtttatccccgctggcgcggggaactcccgggggataatgtttacggtcatgcgccccccggtttatccccgctggcgcggggaactctgggcggcttgccttgcagccagctccagcagcggtttatccccgctggcgcggggaactcaagctggctggcaatctctttcggggtgagtccggtttatccccgctggcgcggggaactctagtttccgtatctccggatttataaagctgacggtttatccccgctggcgcggggaactcgcaggcggcgacgcgcagggtatgcgcgattcgcggtttatccccgctggcgcggggaactcgcgaccgctcagaaattccagacccgatccaaacggtttatccccgctggcgcggggaactctcaacattatcaattacaaccgacagggagcccggtttatccccgctggcgcggggaactcagcgtgttcggcatcacctttggcttcggctgcggtttatccccgctggcgcggggaactctgcgtgagcgtatcgccgcgcgtctgcgaaagcggtttatccccgctggcgcggggaactctctaaaagtatacatttgttcttaaagcattttttcccataaaaacaacccaccaaccttaatgtaacatttccttattattaaagatcagctaattctttgttttcaaacaggtaaaaaagacaccaaccttaaaccatccaaatctaccggggtacgcctgtttaacccaaatgtctggaactcaaatcccgtttccgtattcgttgcccatgccatcactacattgccttcttccgccagtccagctatttgttcccagatcatttcacgaatttttgcggatacatcacctacatatacccctgcacgtacctccaacaaccagatggctaatctgcctcgtaagcgcggaggtacattttcagtgaccacgaccaacatactcatttcagctactccgatggcctgcatctcccagactaacaggaagcggaatggcaacaggctgtgcatcttcaggtggggccggcggttgtatttctccagcggcaagcacgtcctctataagcggaatcaatttggctaatgttttactactgcgaaaaatatccctgcacgccaaacggacttcccggtccggctcaccagggttacgacgcgctatctcaaaagctttcggtacaacagtgtcaaatttaatgatgtctgcaatatcgtaaacaaaggaaagaggctttcctgtatgcacaaacccaatagctggtgcataaccagctgcaagtatcgccgcttcagttacgccgtataaacaggaagttgcagcgctaatgcattggttgatcgtatcgcccttttcccagtctttcggatcgtagcgacgtccattccatgtcacgccgtattgcttcgccagaagtgcgtaggttgcccgcacgcgactgccttctatacctctgagttgctctacggagcgccgggcaggcgcaggttctccaaaccgaagttcaaacattttacgtacgaccttcagacgcaaatcttcatccagagcaagttttgcctgatagagcagcttatcactacgcgcacctccaggctgaccagaagcataaacacgaacgcccgcttcccccacccataccaacaatgttccaacttgcgcagccaggcgtacagctgcatggctaacccgtgtaccaggttccagcatgatgcaggcaacgctgccaacaggaatatgagtgcggatccctgtcttgtcgataagtacaaacgcgccatctattacatcgatctgcccatattgcagaaagatcatggagacgcgatctttgagtggaatgggattaaggggaagccaggtcattttattacacctcaatcacagtggagccaaagatagcaagccacatcccatgcttttagctggcccaataccttgctgtacaagatctattaacgctggcgcgtcgttgatggtgagcacaccttcaaagcaaaccgtttggatctttccacttttaccatcaccagaaaaatactgtggccgttcgcttatgggatgcacatcttcaacgcgcgccgcattgcccaatttacgttgcaaccacgcgatttgttctgcttcttttattaacggaacccgacagcgtttaatattccctttactgtccaggcgcttttgattgtcgagaatagttttgatcggatttgcccgaagccgaaaatagagtggaacaccaacctgaagttgaaattcaacctgtttagttttaatgactgtcgcaacggcagtactaacaggcatttgcgcactctgcaataaaacatgacagccttctggtgtgtttcgcttctcaacatgaaaaagaaaatcacgagcagcatccggtctgtttggaaataaatgccataatccctggtgaagttggtaaagatccctgctccaggccctggcaatgatgactttactgagatacatccatacctcctttaatcacataccattctcgggaagcaaattgtcgaggcaaggtgatcatcggttcgtcgcgcgccgtaaattttaaatgatgccctgtaacactttcctcactatatatatcgccgccaacgggctcataatttaatagcgccttctgaggatcgcttgcctgacatgtccccaaaaaaagcgggtgtgttagtgggcaacttctccgccccaggtaaggtgtataccgaggctttaatactgctttttcaagttcactgataaccatcgttgcatggggtgttaaccagagagcgacggtaaaggaggcatcacataaatattcgcgccatgtttgaatcgtttcatgacttttcaaaccacggtaatcttctcgcgctccaaggactgtatggtaatcacgcaaccccgttacagacacacgacgatcgtcaagaatgagttcatcgcagcgcactgcaaattgcacactctcacttaacgcctgtaaactagaagtatcatcacgttggatcccaagacaagccccgagtagccctaataacccgcttcgggtcggaaatcttccggtaggtcgcgttccttcaaaggtcggctgcccccaggcttgcattggcccagcaagccgcaagatcaaataagatctcatgttcacgcctcgccattattacgaacccaggattttaactgttctaaagtaggcatttgtttaacttgagcagtaattgggtctacatcagataagctgaattgcgcagcagctccgttcagaccatatccattggcaacgcgatcccaatattgattaaacgcctgtatagacggttgcaaaaagccatctttcgctttaaccgctttttcaaaagcatttgccatagaaagtggcatatcggagaaattaaccattaccatatccgcagggttaaaagcggcataagtacgctgttttgctccagggacctctgttgccagcatatgaacaacatgggttgcaatttccagagcctgctccctggaggcaccacctaaattttcctgaagttgagcgaggttaatgttggcataacgataaaaaacaccgctactaaattcctgagttcccagatgtgcagaaccttgttcctgtaaatcatctacagcggtgaaccagtcaatatcagaatcaacctgatgagtagtgatcgcatgcgcaatggacattgcaccatcaacttttcccaactcagtcatcatgccgctggttgccattcttccactaagcgcaatatcaacaccctgctgtaaattcacacgtatggcggcaatatcttccttaagaactttgagcagctttttatcatccagattatcagcctctgcttttgcaacctgctcacagaaccaggctatttctcccacaacccagggagtaaccgcatcggcagaaatcttttcggcttcatcaacacttttaccggagagcagcgctaatgtcttatcgatgattttttggtcaaaacgttcaccaagtttttgccgaagaacatcacgtaattgtgcaagatgaatggttctgagactggattcaccaatattttgtgcgtaataaccacttttacgcatcgcacgtttaaggctttgactactaattcttactcgtcttttgccgccgaaaatagcgtctttctgcatgttcatatcgtcgcggttcagacaactagggctgtgagagatcagaacatgaatattgataaagttagacatagaaaggtttccttacgcatttttgtttgtggtcaatacaaaatcttccagaagttgctggcgttcgcgctttccccaccaggtcaacatcctggccattaatggccagtcaagtacgggttcggcgtgagtaagtaatcgacgtaactggaccatatcggctgttctgtcagcccgaattaattgaaagatacggcgctcgttaattcttccactattggctaaagctcttcccaagctgatacctgttgtttgctcgctttttttgtcctgatgtcggatgacattctttcctgcgctcaggcaaaacaccatgcgcaaaagagcctgctggtgacgtgggttttcccaaccaaaaggttgcaccagcctataaaacgcagggatatcgcgtaattcatcaggttcactaacacgtctaatttgcgcacaacttccattatccagttgttgccaggctcgatataaagccattgcatcaatttcatcagccattacttggccctccttgcggttttaactcccgtaaatgtttgtatagcgtggcgcgggcaagcgctaatgtgcttattaatttaggatgatgtgcatagggagctacagattgattaaatagcatttcacacaattgatgaagtttgtctcgtaaatcagctattacctcatcagcctgggaaaaattaacattcgccagtacatcgggaattaataattcactctgtcgatagaaatgcctttctgcagtctcatgaacagagactccggcccctttgaagtctttatttttaaacccttctgcaaaggtatataacgccttgcgtaaggctgttttatatcccaaaccaacagtcactatttcgtttatcacattgccgtattgttgccacccctgattaaacatcaacacatcatgacgccgttcaagaatagatgcttgattattacgatatccccccataatcaattcaagaggactttgcggcgcaatatttctgaattgattcacaaccgccgccacgcgatttccattttcattttgaataatcttatctaccacaactcggctgatttgtgtccaacttggtgcggaggtggtgaaagcaagaaatttttcctcaacctcccctttcttgactgttaccagacaaggggaatgcggatggggccatagcccattaactgtaaaggtaaatttttccttaagaaaaccggtataacgcaaattgctttcctgtccacagcaagaacatttaccaatcccaatgggatcgcataattcaatatgcgctggttgccagaatagaccacggacaaacccaatactgctagcaggtatagactcattggacttgataggtttaatccaggtaggttggttttccgtatgactttcattaggaaattgtttttgaagacgaggtaatgtgaggacattgagtaacaccgtactacgaagatcgatcccacgtacgaacgttgttacaggtgttcctccacgtaaaccgcttttaaaaccaccaccaaaacctggtgcctgattcgcctggttgaataacgcaatcgcagtgcatccaccacataatgcttcaccctgccccggttgattgacaaatgcacaattcgtcgcgccgcttaccccagccaacagtttttccattggagtcacatcatttgctttgacacctttggtctgcataaagggatgttctgcgtgattaaggtagaacatatctatccacggcgcgatgagttgttgaaactcatcttcagtgagcggattcattatgcgatgtcgaaattcaacgtcatcttttgccggggcgataatttgcccaatgcaaaccagcagtgctaaagcggccagttccatatcgtcacggggcaaacttaatcgccactgatctctactgcagtataggctttgcagatttatgatttggactttccccccgtttcgcgggcgtacagggatccagttatcaataagcaaattcatttgttctccttcatatgctccgacatttctcctgcatttctatacgtcggcacacttccgttatcggtaaaaacaaagaaaaaatacggcgtaattaattcaataatcacattcactgcaaaaatatattcattggtttaatacaattaacctatacatatattaagatgtgttgaattgtttaaagacaataatgcatgcatttcaaatctgcaagttattcgttttattattaaagaaacttttagttataataattaccatgaattttattacataaaatattcatactgtgaatataaaatctcataccgggaaattaaaagaagatgtacattgtgcaccttccctacttaagtagggataaaccgttattggtcttattatcgtcattgataacaatcattcccgaagttatttgggatttgcagggatgactctggtcatcccttcatcccctgtataggtaataacaatactgttaccctgccagacccatccatccagattctgtttcccttccagccaaagtaacccatcttcatctactacttcagaaaaactacgtttccaggtgaagggtacattgacgcgattaagtgcaagcgcctcatactgctgttcatgacttaggtcctcgtagacctggccatcgagcagttgtttaccactagacgtttgtacataaggcaataatggcaggctcatttccccatccctcgttaccgcaagaatggtttcatcgttatcctgcaagctatattcttcagcccactgcaggaccttgcgagccttgaaccttttttcacactcggcgctttcaaatttatccatgccattgccgacccattctggctcatccatttccgcatcatcgtaaatgctatccagccattgccggtaagcatcagggaaaaataaggatgctccattaagctcctcaatatgttgctgcgtccgccacatgactctaacgttgctataaatatgctcatgtcgtccgtaaccctcgccatcaggcagcaaaatggtggcaacaggaatctcaaaaccagcgggacgatatttgcgatgatggcgatgtaaacggcccaatcgttggaaaagcaaatctgcaggacaatgctgagtaattaaccaatcaaaatcaacgtcgagactttgttccacgacctgggttgcgacaagtatccgtccaacatttcgcttcccatttttgccgaaattgctaataactcgattctctttttcacgacgatcgttcagcgtaaagcgcgcatgaaacaaatctatatctacttgcgtgttatttagctcctttagccgttggtagcatacttgtgcaacgtcaaccaaattgcaaataagacagacctgtgcacccgcgtttgccgctgcgatcattcgctctaacatcgtaaggtcaggtaacatgtcagctaaacaaataggttctggctgaatgctaaagcggggcgggagttgttctggatgagctagcagatcaaaacgttgcgcaccattcacacctcgccagttaatgagtggatatgcggagttattttccactggatctgtatgcagaccataagtatccagaagtttctgtttttgtttcattggtagggttgcggaaagaagaataacactccctcccacatcagcctgagccttgagcactgcctccagcaagccgttcatataggtgtcgtaagcatgaacttcatcaacaattaaaacacttcgaccaattcccaaaccacggataaagcggtgtttaactggcaatacgcttatcaacacctgatcaatcgtgcaaacgccgatttgcccaagaaacactttcttattgctttgactcaaccactgacaacactgaacccacgcttcttcttgcccctgttcagtaatcgcgcgactttttatactttgaaagaggtggttaaaccgactattgccatgagcaagaataagatttggggaactaaataagtggctcgcgctcgcttccattctcgtaagcatagcattcgcggtagcttgtgttgggagggcaaaaataacactatccgcaatttgttgatcaataagtttccaagcataggccagcgctgtttccgttttaccggagcctgtaggtgcctctattaccgtcagcccgggagctactggaagagcatcaactaacacctgtaattgtctgggttgatagccattgtccagtagtgcatgaacaccttcataacatcgcttattacttacaagtccactcaactccaatacccggctcgcatcctgctgtcggtcctggaaatacgttctcagagcatttatgtcggaaggcgcatcctcattaaacagaaaggtattcgttgtagtccaggagcctaaccagtcagcaaggctgcaaaaacctgctaacagactactacaatcaggtggtatatcgtttatagataaccccgctggcgttaaaaataatgcttccagtacagatatccactcctcacgagcctgtttatcttgcgcagcataagatgccagagaagctggcatttcccaacggctcttatcttgatcctgggaatgtaatataaaaccatgatgtcctgtaacggcctctacccatggaaaccaggactcataaggatgaggagcggcatcaaaaaaactgaaaaaatccccgagagattgctcactaagactatcctggttaaaccaatacagaccggctgcaccatgattaaatttacggcacatttgtgtacttggaccattaagacttggcgttgcaggatttaatttcagccaactttctgcacttttatattggaatcgtatatcaaactttccaatatcatgaagagcaatgaaaaataacagccaggccttcaccctctgtttacttagcatttcatttcggcaaaaagtattttgcagtacgacactttgatcccaccagcaatctgcaacagcagcaacatcaaggcaatgataaattaacagatgaatatcatttcctttcgtcaagcttttactggattttccccagtaatggcatatatatttaaaaggttccattaatagcctccctgtttttttagtattatcgatgatatcagcgggctatttttcgatgctgctcataaatatcgaattacagtgatatacacatgtcttgcctccctgcaaagaagagactaacattcgaattgtttgggttcgaacgctggcctcaggttgatagaaatatcgcctggggcttttgtccatctggaacctcgcgaatgcttaacgccagacagcctcaagcacccgacgccattctatacctgataattcttcccgcggcgttcacgtttaaaatcaggaatgctgctcgcaaaataaaaacgcccccatcatttctgacagaggcgtttaatttgtccggcaatatttacccttcgtgtaacccacattccctttttaagccaaagaaacgcgtttcttcttccgccatgccgggttcccatttacgggttgtatgggtatcgcccacgcttaaatatccttcatcccataatgggtgatatttcaggccatgtttttgcaggtactgataaatagttcggttatcccagtcgataatcggcagcactttaaatacgccacgctgaattgccagcaccggtaaattggcacgactgccggattgttcacggcgcaggccagcaaaccaggtttgcgcattcagttctttcagagcccggttcatcggttcgactttgttgatgtcattgtacttttcaatgccttcaacgccctgctcccacagttttccgtagcgtgcttcctgccaggctgcgctttcggtagcacggtacactttcaggttgagcttgagtttgtccgttaactcgtcaataaagcggtaggtttccgggaacaagtaacccgtatcggtgaggatcaccggaatatccgggcgaatttgattcaccagatgcaggctcaccgccgcctgaatgccaaagctggaagaaagtacatattcaccgggcagattatccagcgcccaggctacgcggccttcagcgtccagtttttccagttcggcgttagtttccgccagcgccagaatgcgatctaccttcggcagttcgttcagggcgtttagatcgagtttggacatagattcctcactgtttgccttgcctgatgcgacgctcacgcgttcttatcaggcctacaagaccgggctgatggttaatcccacaaatcacgcgccggatcgagcaccgggcgaatgatgcccgcacgcaccgtaaagtcgccgaagccttcacccgcttcgcgctctttcgcccagcgccctatcagttcatcaaggctcgccaggatttccggctcggtgatgttttctttatacatccgtgggatacgtgtcccaatgcggttgccgccaagatgcaggttgtagcgacccggcgctttacccaccaggcccacttccgccagcatcgcgcgaccacaaccgttcgggcagcctgttacacgcatcacgatatgctcatcgctgacaccatgtttcgccattaaattatcgatgttgtcgataaaagacggcaggaaacgctctgcttccgccatcgccagcgggcaagtcgggaaactcacgcaagccatgctgttttcacgctgcggcgtgacggcattcattaacccgctctctttggcgatcttctcgatcttcgctttctcgctttccggtacaccggcgatgatcagattctggttcgccgtaatgcggaaatcgcctttgtggatcttcgcgatctccagcaggccggttttcagcggacgcgccggataatcaaggatgcgaccattttcgataaacagcgtcaggtgccagttatcatcaatgcccttaacccagccaatacgatcgcctcgtccggtgaactcatatggacggatcggttcaaatttgatccccgcgcgacgctccacttccgctttaaacgtctcaacccccacgcgctccagcgtgtatttggttttggcatttttacgatcggttcggttaccccagtcacgctgagttgtcacgacggcttcggccaccgccagcgtatgctccagcggcagatagccaaactcactcgcggtgcgggcgtaggttttcttgttgccgtgttcgatggaaagcccaccgcccaccaacaggttaaagcccaccagcttgccgttttcggcgatcgccacgaagttcatgtcgttggcgtgcagatcgatatcgttctgtggcgggatcactaccgtggttttgaatttacgcggcaggtaggtctggccgaggatcggttcttcatcagtagtggcgactttttcctggtcgagccagatctccgcatacgcgcgggtacgaggcaacagatgctcagaaatcttcttcgcccactcgtacgcttccgcgtgcagctggctctcgtaagggttgctggtgcagagtacgttacggttcatgtcgttagctgtcgccagcgcatcaagaccgacgctgtgcagcatctggtgcaccggtttgacgttctttttcagaatgccgtggaactgaaacgtctggcggttggtcaggcgaatgctgccatagatggtgttttcaccggcaaatttgtcgatcgcctgccactgtttagtggtaatcaccccacccggcagacgacagcgaagcagcatcgcgtggcgcggctccagcttctgttcagcacgttcggcgcggatgtcgcggtcatcctgctgatacatgccgtggaagcgaatcagcaggaagttgtcgcccttaaagccgccggtcagaccgtcgtttaaatcttccgcaatggtgccgcgcaggtagttgctttcatgcttcatgcgctcggcgtctgtcagttttccttcgaccactaaaggccctggatgtttttcgctcattagtagacatctcgctgataacggcgctctacgcgcagctcacttaaaaattcatccgccgcttcggtgtccatgccaccaaattcggcaatcacttccagaagtgcctgctcaacgtctttcgccatgcgattagcgtcgccgcagacataaatgtgggcaccatcattgatccagcgccacagctccgcgccctgttcgcgcagtttgtcttgtacgtaaactttttctttttgatcgcggctccaggcaagatcgatacgtgtcagcacgccatctttgacgtagcgctgccactccacctggtacaggaagtcttccgtaaagtgcggattaccaaagaacagccagtttttacctggcgcttcgtcggcggcgcgttgctgcataaaggcgcggaacggcgcaataccggtgcctgggccaatcataatcaccggggtttctggattggctggcaggcggaagttatcgttatgttcgataaatacgcggacttcgccctcttcttccacgcggtcagcgaggaagctggaggcaccaccggcacgggcgcggccttccacgtcgtaacgcaccacaccaacggtgacgtgtacttcgttctcgacttccgcctggctggaggcgatggaatacagacgcggcgtcagcgggcgcagcagattaattagcgcttcggcatcaagctgtgccggggagaaacgcaccatgtcaacaatcggcgtcgtcgcggcgtaatgctgtaacttcgctttatcgcccaccagcggcagcagtgtttcactgcgggtaagcgtggcgtaattctcaacaatgttggcggtgttgacggtcagttcgaagtgccactgtagcgcttcgttcagaggcaacgttttgccctcgacggtgacaggttcatcgcctttcagccacagcagttcgacaagttctttcaccagtgccggatcgttctgataccagacgcccagcgcgtcacccggctggtaacgcatgccgctgtcacctaagtcaatttcgatatggcgaacgtctttttcagagttacgcccggtaattttctggttaacagagaggctagccaccagcggcgcgtctttgctgtacgggctggtgtggatttcatttaccgcgccagtagcgacggattggctaggtgccgcgacaggcgcacggcttttaagcgcatcaaccacgcgggcgcgccactcgctggcagcagcctggtattcaacatcggcatcgacacggtcgagcaggcgttcaccacccagttccgccagcttgctgtcgaaatctttcccggactggcagaaaaattcataagagctatcgccgaggctaaacacggcaaacgcggtgttttccagctttggcgcttttttggagaacaggaacttatgcagcgcgacggcttcttccggcggttccccttccccttgcgtactcgtcactacgatgagcagtttttcgctggcgatttgtttgaatttatagtcgcccgcgttcaccagcttaacgttcagttttgctgctaataaatcatcacgtaatgcttcagcaacccggcgcgcattgccggtttggctggcggagataatagttatacccggcatttctgcggctggcgctggcgtcgctgcaagcgcagcaggctgctgattgagtacgccccagaaatagccagaaacccaggcaagctgggtgggagttaaatcggtcgtggccgcctgaaggcgtgccagttgctccgggttcaacggaagcaacgcggaaggtgggacctgtgtcgtcatgcgtcgttatgttccagtaagcaaagctgtttctgcgccctgtcagcgcccataaaacagaagagaaggtaaggttaacggggcaaacggtgtggattaaagacgggatagcgataactaataaccaaatcgactaacctgttttagcaatagtctttaacaacaaaatagattaaccaacctaatgaaaaacaaatgaatttagccaatcattaagataaatcagcgattttgcgcaacaaagtcgttttagataatgcgaaaaaacagcctttccggtactctacggcggttttatcgtcctgtagagaaattatgatgtccaccacgttatttaaagatttcaccttcgaagccgctcaccgcttaccacacgtcccggaagggcataaatgtggtcgcctgcacgggcattcctttatggtgcgactggaaattaccggggaagtcgatccgcatacgggctggattatcgatttcgctgaactaaaagcggcgtttaaaccaacctacgagcgcctcgatcaccattatctcaatgatattccaggtctggaaaacccaaccagcgaggttttagcaaaatggatttgggatcaggttaaacccgttgtgccgctgttaagtgcggtgatggtaaaagaaacctgcaccgcaggttgtatctatcgcggcgaatgataagagtgtgtcggcggtcaatttcccttaagtaacgctatgttagggtgttgtgttctggatatctggggcatgacatggaagacgactgcgacattattattattggtgccggtattgcaggcaccgcttgcgcgttacgctgcgcgcgagcgggtttatccgttttgttactggaacgcgctgaaatccccggcagcaaaaatctttccggcgggcggttatatacccatgcactcgcggaactcctcccgcaatttcatctgaccgcgcctcttgaacgacgcatcactcacgaaagcctttccctgttaacgcccgatggcgtaacgacgttttccagcttacagcccggcggtgaatcctggagtgtattacgtgcacgattcgatccgtggctggttgccgaagccgaaaaagaaggtgtcgaatgcatccccggagcgacggtggatgcactgtatgaagaaaacggcagagtctgtggcgttatttgtggtgacgatattctccgcgcccgttatgtggtgctggcagaaggtgccaacagcgtcctggctgaacgtcacgggttagtgactcgtcctgctggcgaagcgatggcgttggggatcaaagaagtgctgagcctggaaacatccgctattgaagaacgttttcatctggagaataacgaaggcgcagcgttgctgttcagcggcaggatctgtgatgacttacccggcggcgcatttctttatactaatcaacaaacgctcagcttagggattgtttgcccgctctcttcccttacgcaaagtcgtgttccggcaagcgagctgctgactcgctttaaagcgcatccggcagtgcgcccgcttatcaaaaacacggaaagtctggagtatggtgcgcatctggtgccagaaggtggcttgcacagtatgccggtgcaatacgccggtaacggctggctgctggtgggcgatgcgttgcgcagttgcgtcaataccggaatttccgtgcgcggcatggatatggcgctgactggcgcgcaggcggcggcacaaacgctgataagcgcctgccagcaccgcgagccgcaaaatctgtttccgctttatcatcacaacgtagagcgcagcctgctgtgggatgttctacagcgttatcagcatgttccggcgcttttgcaacgcccgggatggtaccgtacgtggcctgcgttaatgcaggatatttcccgcgatttatgggatcagggtgataaacctgttccaccgctgcgccagttattctggcatcatttacgtcgtcacggcctgtggcatctggcgggcgatgttatcaggagtctgcgatgtctgtaacgtaagatgttatcaggagtctgcgatgtctgtagcccgtaatctctggcgcgttgctgatgcgccgcacattgttccggctgactccgttgagcgccagacggcagaacggttgattaacgcctgtccggcaggtctttttagcctcacaccggaaggtaacttacgtattgactatcgcagttgcctggagtgtggcacctgccgtttgctgtgcgacgaaagtacactacaacagtggcgctatccgccttccggattcggcatcacctaccgctttggataaataataaggataatttatgcccctcttacacctgctccgccagaatccggtgattgctgccgttaaagataatgccagcctgcaactggcaatcgattctgaatgccaatttatttccgtgttgtacggcaatatctgcaccatcagtaatatcgttaaaaagattaagaacgccgggaaatatgcttttattcatgttgatttgctggaaggcgcgagtaataaagaagtcgttattcagtttttgaaactggtgaccgaggcggacggcattatcagtaccaaagccagtatgttgaaagcggcaagagcggaaggttttttctgtattcatcgcctgtttattgttgatagtattagctttcacaacattgataagcaagttgcgcaaagcaatccggattgtattgagatcctgccaggctgtatgcccaaagtgctgggctgggtgacagagaaaatccgccaaccgctgattgccggtgggctggtgtgcgatgaagaagatgcgcgtaatgcgattaacgcgggtgtcgtggcgctttccaccacgaataccggggtctggacgttagcgaaaaaattactttgacgggataatcgtaaccaattgaatttggtttgatttgtaggccgcacgccacatccgacattcagcgcctgatgcgacgcttgacgcgtcttatcaggcctacaagtccccaggccagaaccgtaggcaggatcatccggcaacacgttattggcaatctgcgtgaatgtttgtcaccagtgcctccagcaccactttccagtcatcaaccacgccaacatctgcctgactaaataccgcagcgctggcgtcatgattaatcgccaccacaaacttgctattgcgtacgcccgccattaacgctgctgcgccagaagcgccaacaacaatacacacctcaggtgccagcagatgtccggaaataccaatcactttttcagcatcaacgccaccgttcatcactcgcgcccgactgtagcccacttcggctcccagcttttctgccagcatagcgatttcctggttatctgcctctccgccctgccccaccaccagcacccgtctggcctcagctaatgggtcgcgggtaacatttttcagatcctctgtgctaaccagccagtccggaagcgcacccgggacaatgttcagttgttgcattccagagggcaacgtggcgtttttcgctgctcccgcctgacgcgccagggaaaggcatagcgggcgtttttctgtttgcagcgtcgccgttagcgcatttccccagtgggatttgcgcacgcttacggttggaatatctaagctagtcacctggcagatgcttgcaccatgtaaacgccaggccagccgggtgctcagttcatcgccaaacgttcccggcggaaagagaacaacgtccgcaggcgttcgctgccactgttccaccaacgcatccagcacctgttccgccactacaggctgaggttcaatctgccagtgcgccagggtacaaccgctgaaatcctgcgccgccagccagcttgctattgcggcattctcctgatttattgtcacaattgcgatattcatggctgcatcctttggcgtaaatagtcctgccatagcttttgagctttttctgctaccgtttgcccatcaatcagcgtcgctccgcgtcgttgctctgctcttgccagttgcagacactgcatcgctggcatttcggcagcaacagttttacggataatttctgctttccccgcagccattcgctggcgcattcccggtactggcaaggccacttcaccgcactgacgcacggcaatcaccgcaggcaagcgaacccggcaacaacgcaacccatgttcagtacgctgttcgagggtgataaacagcgcgtcgagagtgaaacgctccacctgggtgaagcagggccagcccagcatttccgccagcaaaaatggcgtttgcccattctgcccttcgctgctttggcagccggtaattatcagatccagcggattctgatgctgccattcggcaatatggcgagcgacaaattccggcgcaaagcgcagatctgccgccgtctccagcaatacagcttcctcaaacccaagagccatgagatagcgcagccagtgcaatgcccgttcatcccccatgctcaacgcggttaaagacatcggcgtaccgttttttctctgcgccaacagcagcgcggcagcggcctgttcatcagcaccgagtaaacttcgcagtaggctaatatccggtccgcttttaccctgagccgccgcctgccactctttttccgccagcattccggcatccggttcggctttaaacgctaacagaatgttcattcgcacctcctacatttcccgccgccaccagcgggagggctttagtttctggtgcccatagccaggtcacaacaaaaccaaccaacaacactgtcgccaggagcaataaggtgacttgcattccccactgcgccagcacccacggcagcaggccagtacttaccgccgcgccaagtcgactcatggcagtggcaaaaccgacgcccaggctgcgaatgtcagtaggaaaactttccgcaggcaaaatgcccaccagattactgactgcgctaatggtggtgctgaagagaacaaaaagcagcagcgttaaactactgccggaaggcaaacaggccatgactaccagcgttgccgccagcagcaaaaaacttcccagcaaaaatttgcgatgtgccagcaggtgcgtcagaactaatcccagcagcgcgcccacaattaacaacgcattaagcatcaggctggcagtcagcgcatcttccagaccaatagtctgggcgatagttggcagccaggtataaatcacaaaccatgggattacgaggcagacaaagaagacgctgttaaacgccgtgcgccgccagtaacggctagagaacaaggttttgatgtgtttatgggtcgccgttaccacttcatcgcccagtaaaacatggggaccaaaatagcgatgcacgatagcgtgagcttctgcaaaacgcccctggcgcagtagccagcgtggactttctggcgttccccagcgtaataacgtaatcaacaacgcgggcagagctgcgcttgccagtagccagcgccaggcctccgggttttcggaaataaagtgatgtccggcaatacttgccagcacatagcctacggtccacaccacgctgaatgcgcccagcaaaataccgcgatggcggcgcggggaaaattcagccagcaaggtgtgacctacactataatcgcctcccagaccaatgccaatcaaaatgcgcagtccaataagatgctctggcgtggtggcaaaaaattgtaaaaagctagcaagcgtaatcagcaaaaagctgaaggtgaagattttttgccgaccaatatggtcggagatccacccaagaaccaggctgccaaggaacaaaccaaggagcgcgctgccgccgatcattcccgccataaacggcgtcagttgcatggcgggcgtaagctgaataatggcgtaaccaatgacgccgagaacataaccgtcggtcaggtgtgcgccgaaagtgagcgcagcaatgcggcagtgaaaacggttaagcggtaaatcatccattcgcaccggactagtgttcatctttaccccttcattgtccggtaataagaacggcttctcgcctgagaagccgaaaaggcaacgccccgtcatcgcggaacgctgcctgacacattatttttcaatcggatagatagtacccgtattcataatgccattaggatcgaactgctttttcagcccttccagcaacgcccacgcgctgccgtgttccagtttgctccagtgaacgcgatgtttaccgataccgtggtggtgcaccatgctaccgccgaggcgaatggtttcttcacagatgatcttgttgagcggattgtggtacttgtcgatttcctcttccggcttacagtcaacgacgttgtaatcgtagacgaagtacatgttggtgccgttctgatagctatgagaggaatgaccgcccagcatggtgatgtcgtcggcgtgcgggaactcagtacgaatacggttaataacgctttcgtagatttcgtggatgcagctccagcagccggatacttcggtggtaaagcccatgttgccggttttgaggatctgcacacgttcggcagccactttatccggtccccagttcaggttgttaaaccaggtttcgatcagcttgctgtccacgcgctggcattgcgggtagcgggcaacgatttccgcaatcccttcgcccgtcaccttcgcaatgcgagggttaccttcagccataaagatcagcacgcattttccgtcggcaaaatgggtgaagtgttgggtgccatcttcagcgtcatacaaacgagcgatactcggacgatacccttccaccatgatttcacgcaggatgttgaagccggttttcatgtcttccaggatatagccgtagaagaggttgttttccggggtgaatttaaagattttcactgttacttcagtgatatagcacaatgcaccttcgttgccgatgatgatgtgacgaatgtccgggccagccgcgcggcgtggcacgtttttaatgcgtgtgacggtgccatcagccaatactgcttccagaccaacgaccatatcttcgattgcgccgtagagtgtggagaactgcccgatacttcgggttgctaccaggccgcccatctgcgccagcggcttactctgcggagaatgccccgtggtgtaacctttttcacgcaacgcgttttccagcacttccagcggaacaccacattgcgccgtcgcctgcatattctcaatatcaatattaatgatttgattcatggcggagccgtcgagcaccacgctgttttctacaacagtttccagcccaccttcggtggcggaagcaccggtacgcggcacaccgttaattttgtgcgcattcataaaattcagcacacgggatacttgctctgtggaaccgagttttacgaccgctgccggaatcggcaaagtataaatgccatgaatatccggaaatttacgaaaacggtcaatactgtttttctttaatactgtttcatcggtaattacgcgatctgcaccaacaatttcctttagctggtcgacaatcgctgcgcgagataaagacatagtaattccttcctgataataaaaatggaataatcattaataagagaaaacagaaaccaccgttatgggttagcgcactaaataaccgccatcaaccactaataaatgcccgttgacataattgcttgccggacttgcgaggaatacggctgcgcccattaaatcctgagtatcgccccaacggtttgccggaatatgatcaagaacgcgctgattggtttctggattactgcgtgtcgccagcgtaatatctgttgcataatagccaggggcgataccatttacctgaatattatattgacctagttcatcacaataagctttggtgaacccggcaagagcatgtttagtggcagaatatgcaggactccattgtccacctaagtaagagaacaaactacagatattaataattttgccgcttttctgcgggatcataatttttgcagcttcatagcttaactcgaatgcggcggtcaggttcacatcaatcatcggatcccagtcggcacgaccgaagtccagcaccttattcagcttacaaataccggcattgttaaccagaatatcaactgtaccgaaacgctcacagcaagcagcgataatcttctgcggcgcgccttctgcggtgatacccacctgcatgaagtccacctcaacaccctgtttttcaatcatttcctttgtttcgccgttatctttgacgaaactaggaataaagatatttgcgccagctttggccaacgccatggcaaatgcctggcctaaaccgctattcccaccggtaacaattgcggttttacctttcagggagaaaaaatccatactgaacgcattgagagattcgatactcatagttagctccaatttccgtaaggcaaaaaaaaagaaaggtaacttcccccgcgagagggaagttacctttctcattatctctggtaactggagataatttttagcataagggcataactgctaatgtgatcgtaatcacagtgtgatattcgtattgtcaaataattttaaaaagcagaagcgtgattactctcacacaacacctctgctttccatgttatttattatttcaattactagagacctgagaaaagtaatccacctgaaagggcggcttacttttctcttttttttgtctattacaaatgggaatacgatatgcaacacaacagttatcgccgttggataaccctcgcgataattagttttagcggcggcgttagtttcgacctggcttatttacgttatatttatcaaattcccatggcgaaatttatgggattcagcaataccgagataggtttaataatgagtacctttggtattgcggccattattctttatgcccccagcggcgttattgccgataaatttagtcaccgcaaaatgattacttccgcgatgatcattaccggattactgggtctgttaatggcaacgtatccaccgctgtgggtaatgctctgtattcagatcgcctttgcgataacgacgattttaatgctgtggagcgtgagcattaaagctgcaagcttgcttggcgatcatagcgagcaagggaaaattatgggctggatggaagggctgcgcggcgtcggtgtaatgagcctggcggtgtttaccatgtgggtcttttctcgctttgcaccggatgacagcaccagcctgaaaacggtcattatcatctatagtgtggtttacatcttgttggggattctgtgctggttttttgttagcgataacaacaacctgcgcagtgccaataacgaagaaaaacagagtttccagcttagcgacatcctggccgttttgcgtatcagcaccacctggtattgcagcatggtgatttttggcgtcttcaccatctacgccattctgagttactccaccaactatctgaccgaaatgtatggcatgagcctggtggcggcgagctacatggggattgtgatcaacaaaatattccgcgcgctgtgcggcccacttggcggcataatcaccacctacagcaaagtgaaatcccctacccgcgtgatccaaatcctttccgtactcggcctgctgacgttaactgccctgctcgtcacgaactctaacccgcaaagcgtcgcgatggggattggcctgattttactgctgggattcacctgttacgccagtcgcgggctgtactgggcctgccctggcgaagcgagaacaccgtcttacattatgggcaccacggtaggtatttgtagcgtgattggattcctgccggatgtcttcgtttacccaattatcggccactggcaagacaccctgcccgctgcagaagcctaccgcaatatgtggctgatgggcatggcggcgcttggcatggtgattgtctttacctttttgctgttccaaaaaattcgtactgctgatagcgcccccgcaatggctagcagcaagtaagccaggaaaattacaggagaaaaatcatgagcaaaaaatacatcatagggattgatggcggaagtcagagcacaaaagtggtgatgtacgatctggaaggtaacgtggtttgcgaaggcaaaggcttattacagccgatgcacacgccagatgccgatactgcagaacatcctgacgacgatttatgggcaagtttatgttttgccggtcacgatttgatgagtcagtttgccgggaataaagaagatattgtcggtattggtctgggatccatccgttgctgccgtgcgttattgaaagccgatggcacgcctgctgcgccgttgattagctggcaggatgcacgcgttacacgcccttacgaacacactaaccctgacgtggcatatgtcacctcttttagcggttatctgacgcatcgcttaaccggcgagtttaaagacaatatcgccaactattttggtcagtggccggtggattataagagctgggcatggagcgaagatgctgcggtaatggataagtttaatatcccccgtcatatgctgtttgatgtgcaaatgcctggcaccgtcctcggacatatcacaccacaagccgcactggcgacacatttcccggcaggactgccggttgtttgtaccaccagtgataaaccggtagaagctctgggggccggattactggatgatgaaacggcggtaatttctcttggcacttacatcgcattgatgatgaacggcaaagcactgccgaaagatccagtagcgtactggccgattatgtcttctattccgcaaacattgctgtatgaaggttacggtattcgcaaaggcatgtggacggtgagctggctgcgcgacatgctaggcgagagcttaattcaggatgccagggcgcaggatcttagtccggaagatttactcaacaaaaaagcttcttgtgtgccgccaggctgtaatggtctgatgacggtgctggactggctgaccaatccgtgggaaccgtacaaacgcgggattatgatcggctttgattccagcatggattacgcatggatatatcgtagcatactggaaagcgtggcgctgacgctgaagaacaattacgacaatatgtgtaatgaaatgaatcactttgcgaagcatgtgatcattactggcggcggtagcaacagcgatctgtttatgcagatttttgccgacgtgttcaaccttccggcacgacgtaacgccattaacggttgtgcaagcctgggggcagcgattaatacagcggtaggtctggggctatacccggattacgcaacggctgtcgataacatggttcgcgtgaaagatatctttataccgattgagagcaatgccaaacgctacgacgcgatgaataaaggcattttcaaagacctaaccaaacatactgatgtgatcctgaaaaaaagctatgaagtgatgcatggggaattggggaatgtggatagcatccagagctggagcaatgcgtaagtgaggaaggccgggcgggaaactgcccggcctgaacatacctgaatggttatccccgctgacgcggggaacataagttcgacaacttaaaaaatgataacaagtccggtttatccccgctgatgcagggaacataataaaaactttaactagttcggtttatccctgtttttacaaggaatattaactacactcgatgtctttagaataaaagacaatacgaatcgcactttatcaattttcacttaaagtatgaactggatatctttattcataagaactattcatcaacagcgtatagaggcggttatgtaaaaccactcattagcctcaaaacaaagacaaacttccagatttattacttaaccaatgaataacaagcttaaaaaatatactgttattctaaagaaaaaattaacaggcattaattcaatattaaaaaaataatagattaaaatttcttaacgatttaagaatcatacaaataacactttgattaaatttaattttttgtatcgataattgtgaacctctctggcatggagaactattttgaacatgaggtgttacgtggatatgttgcttattacaagtactgctaatataaaaacttgagaaagagataacgggttatatggtggtttatccccgctggcgcggggaactcgacagaacggcctcagtagtctcgtcaggctccggtttatccccgctggcgcggggaacacctgttttcgcaaatctatggactattgctattcggtttatccccgctggcgcggggaacacgggcgcacggaatacaaagccgtgtatctgctcggtttatccccgctggcgcggggaacactggctctgcaacagcagcacccatgaccacgtcggtttatccccgctggcgcggggaacacgaaatgctggtgagcgttaatgccgcaaacacaggtttatccccgctggcgcggggaacacattacgcctttttgcgattgcccggtttttgccggtttatccccgctggcgcggggaacactctaaacataacctattattaattaatgattttttaagccagtcacaatctaccaactttatagtatcacacaaacaacacatccattatgttaaagagcacttaatccattgattaaaaaggtaaatatttaaaataactctatacaaactaaaatctaccaaactttaccgcaataattttcactccagcgaaaaattaatgccacagaatttgtagagaatgctaatgattagccctggatgggtaaaatggaggagttttcagaggcgacaaacaatataaatgagtagaagtctttacaggttccacccatttataacgcttataaatgtttaatcaggcaatatttagatatttatgtgtttgcatgctcaaacgccaattacgcgcaatgcaggtttcaatgcacaaacgtgtggcatcatccttttggctaatcggctgcagtgcaatgactcgcggtttatcatcggtcagcgttgccagtagttcatccagtgcttcaatatcgcgtacgcgccccactggatgcttgatttcgttggctcgctccagtgcctgactcaacacttcatagccgccgcgcatgttcagctttgggcttacggtaacccaggtattcggtgtgcagcgtacctcatgagtaccactggtttcgatctggcagctaaaaccgttcttttcgagcagatcagtcagtggcagcaaatcatgaatgcaaggctcaccacccgtaatcaccacatgccgcgcggtgtatccctggcgaccaatgacagccagcaaatcttcactgctcgcagccccccacttatcactctctttggtcttcgccagaatgctgaaaagggagacttcccgatcctcaagcttttcccaggtgtgtttggtgtcgcaccaggcacagccaaccgggcatccctgtaaacgaataaaaatggcgggaacgccggtaaagtaaccctcaccttgcagggtctggaacatctcgttaatcgggtactgcatagcattctctgtgaagtggataattgttaattattgcagatcctgccacaacaatcatgtcttattaacattctgttacaggcaggtttaaagaaaaatgcgaaacatatcgttaataattaaagggagtaacgtattatgtcagaagaaaataaagaaaatggatttaatcatgtcaaaacattcaccaaaattatatttattttttctgtattagtttttaatgataacgaatataaaattaccgatgccgccgtcaatttatttatccagatttaatgagaaatttataatgcgctatttcatactaatgttcactttcgtatgttcctttgttgcagcccaaccaactattgtcccacaattacagcaacaagttacggatcttacgagtagcttaaacagtcaagaaaagaaagaactgacgcacaagttagaatctattttcaataatacccaagtgcaaattgccgtattaattgttcccacaaccaaagacgagacaattgaacaatatgctacaagagtttttgacaattggcgtttaggagatgccaaacgtaatgatgggatactgatcgttgttgcctggagcgatcgcactgtccgcatccaggtaggttatgggctggaagaaaaggtaaccgatgctctggctggagatatcatccgtagcaacatgatacccgcatttaaacaacaaaaattagctaagggattagagctagctataaacgctttgaataaccaactcactagtcaacaccaatatccgactaatcctagtgaaagtgaaagtgcgtcttccagtgatcattattactttgctattttttgggtatttgcagtgatgttcttccctttctggttttttcatcaaggcagtaatttttgtcgcgcatgtaaaagtggagtctgtattagtgcaatctatcttttagatttattcctgttctccgataaaattttttccattgctgtattttccttcttttttactttcaccatatttatggtctttacctgtttatgtgtacttcagaaaagagcatctggtagaagttatcatagtgacaacagcggttccgctggaggcagtgatagcggcggatttagcggcgggggcggttcttctggaggtggcggcgcatccggccgctggtaactcaaccataaaaaatgccagcccggaggctggcatttttaaatcagataaagtcagtcttatgcctggcctttgatctctttacgaccgttgtacggtgctttttcgcccagagcttcttcgatacgaatcagctggttgtatttagcaacacggtcagaacggctcatagaaccagttttgatctggcctgcagcagtaccaacagccaggtcagcgatggtagcgtcttcagtttcgccagaacggtgagagataactgcagtgtagccagcatctttcgccatcttgattgcagccagagtttcggtcagagaaccgatctggttgaatttgatcaggatggagttagcgatacctttttcgataccttctttcaggatcttggtgttggttacgaacaggtcgtcaccaaccagctggattttgtcgcccagaactttggtctggtatgcgaaaccgtcccagtcagattcgtccagaccgtcttcgatagaaacgatcgggtactgtttggtcagttcttccaggaagtgagtgaattcttcagaggtgaacgctttgttgccttcgccagccagaacgtatttaccatctttgtagaattcagaagctgcgcagtccatcgccaaagtgatgtctttgcccagttcataaccagcagctttaacagcttcagcgataacagccagagcttcagcgttggaacccaggttcggcgcatagccaccttcgtcaccaacagcagtgttcatgcctttcgctttcagaacttttgccaggtgatggaaaacttcagaacccatgcggatggcttctttcacagttttcgcgccaaccggctgaatcatgaattcctggatatcaacgttgttgtcagcgtgctcaccaccgttgatgatgttcatcatcggaaccggcatagagtatttgcccggagtaccgttcagttcagcgatgtgctcgtacagcggcatacctttagcagctgcagcagctttggcgttagccagagatacagccaggattgcgttcgcgccgaatttggatttgttttcggtgccgtccaggtcgatcatgatcttgtcaatgccagcctgatctttagcatctttgccaatcagcgcctgagcgatcgggccgtttaccgcagcaacagctttggttacgcctttacccaggaaacgggatttgtcgccatcgcgcagttccagagcttcacgggaaccagtagaagcaccactcggagcagctgccataccgacgaaaccaccctccagatgtacttcggcttcaacagtcgggttaccacgggagtcgatgatttcacgaccgatgatttttacgattttggacattaggttttcctcaagtcactagttaaactgaaactccagacaaacaacgcgtacccagggtacgcgttgccgctctaacttttttacttacttcgcctgacgtttctggaactcgctggcggctttcacaaagcctgcaaacagcgggtgaccatcacgtggagtagaagtaaactccggatggaactggcaagccacgaaccacgggtgattcggaacttcgatgatctcgaccaactgatcatccccggaacggcccgcaacgcgcagacctgcatcttcaatctgtttcaacagcatgttgttgacttcgtaacggtgacgatgacgctcaacaattgtcggcgcattgtacagctggcgaaccaggctatcgtcaaccaactggcactgctgtgcgccgagacgcatggtaccgccgagatcgctcttctcgctacgaacttcaacgttgccgttttcatcgcgccactcggtaatcagcgccacaaccgggtacttacagtctggcacaaattccgtagagttggcgttctccatgttggcaacatggcgagcgtaatcaattaacgccacctgcatacccaggcaaatgcccagataaggaatattgttctcacgcgcaaaacgcgcggtcgtaatcatgccttctacgccacgatagccgaaaccgccaggtacgaggattgcgtccagacctttaaggatttcaacgccgcgcgtttcaacatcttgactatcgatcagtttgatgttgacgctgacacgattcttcagcccaccgtgtttcagtgcttcgatcacacttttataagcatccggcagttcaatgtacttgccgaccataccgatggtgacttcacttaccgggttcgcttcttcgaagataacctgttcccattcggacagattcgcttccgggcagtttaagctgaatcgtttacaaatataatcgtccagcccctgagatttcaacaggcccggaattttatagatggaatcgacgtctttcagagaaataaccgctttttccggaacattacagaacaatgcaatcttcgcacgttcgttcgccggaacagcgcgatcactacgacaaatcaggatgtcaggctggataccgatggagagcagctcttttacagagtgctgagtcggtttggttttgacttcaccagacgctgccatgtacggcaccagcgtcaggtgcataaacagagtgtgctcacggccaatttcaacagccatctggcgaatcgcttcgaggaacggcaaggattcgatatcacctactgtaccgccgatttctaccagtactacgtcatgaccttcgccaccttccagcacgcgctctttgattgcgttagtgatgtgcggaataacctgcacggttgcgccgaggtagtcaccgcggcgttctttacgcagaacgtcagagtagatacgacccgtggtgaagttgttgcggcggctcattttggtacgaatgaaacgctcgtagtgccccaggtccaggtcggtttcagcgccgtcttcagtaacgaacacttccccgtgttggattgggctcatagtacctggatcgacgttgatgtacggatccagtttcatgatggtcacattgaggccacgggcttcaagaatggctgcgagggaggctgcggcaatgcctttacccagagaggatacgaccccgccggtcacaaaaatatagttcgttgtcatgctgaacctgagaagttaggttgaaaagacgatggaataaccaagacgggaaagcagtatacccgaacatgacctgtgccacaaactttcattatccctcctcttcgccagcgcactattgaaatcaggagtgagaaaatagcccctttggggtaaatgtttttgacgcaaatcaagcgcttgtcatttaaaaaatgacacaaatggcgcttgaccgcgtaattcccttagagatcaatttcctgccgttttacctgttgccagacttcttccattgtttcgaggtcaacacctgtcatttccagtccacgcgcggcaacaatacgctccacttcgcgaaaacgacgctcgaatttttcgttcgctttttgcaatgcgatttctgctttcgtccctaaatggcgagccagattaaccgtggcaaacagcaggtcccccatttcctcctccagtttagcctggtcgacaacagcctgccgcgcttcgtacatcacctcgtcgatctcttcgtagactttatcgactaccggaccaagcgtcgtccaatcgaagccaacgttggcgcaacgtttctggattttttgcgcacgcattaaagccggtaaactacgaggaatatcgtccagcgcgctatgctgcgctttctgcgcgcgctcttcggttttgatttgctcccaacgggcaagcacttcactactgttttcggcagaactatcagcaaaaacatgcggatggcgacgctctaatttatcgctaatagcagcgcaaatatcattaaagtcaaagcgcccttcttcctgagccatttgcgcgtaaaacaccacctggaatagcagatcgcccagttcaccgcgaagatcgtcaaaatcttcacgggcgatggcgtccagcacttcgtaggtttcttcaagggtgtaaggcgcaatggtggcaaatgtctgctctttatcccacgggcagccgttttccggatcgcgcaggcgctgcataatagtgagcaaacggtcgatttgattcattgaattgtcctgaaaattgcgggtctgtcaggtggaaacctgtgaccagaatagaagtgagttagtaacattacccaatcagtacgttaattttggctttaatgagttgtaattcctctggggcaactgttcctttcttcgttgctcctcttgcccgccaggcgatactttttacctgatcagctaacgctacgccatcacgttcctgaccggataaaacaacttcgaacggatatcctttactttgcgttgtacaaggaacacacagacacatacctgttttgttgttgtacatgaaaggactcaggacaacagctggacgatgtccagcttgctcgctaccttttgtcgggtcaaaatcaacccaaatcagatcgcccatatcgggtacgtatcggcttaccattaccagacttccttatctttcggctctccccagtcgatattctcgtggaggttttccggcgtgatgtcgttgaccagttcagcaagcgtaaatacgggctctttacgcactggctcaataattaatttgccatccaccaggtcaatcttcacttcatcatcaatattcagattgagcgcctgcattaacgtagccgggatccgcaccgccggactatttccccaacgctttacgctactgtggatcataaccctttcctcaaaccgctatcatatgtagatacagtatatatcaatctacattgtagatacgagcaaatttcggcttaactcccgtgcaaccgacgcgcgtcgataacatccggcacctggttgagtttacccagcacgcgccccagcacttgcaggttgtaaatctcaatggtcatgtcgatggtcgccagttgctgtttggtgtcgctacggctggcaacgccaagcacgttcaccttctcgttggcgagaatggtcgtgatatcacgtaacaacccactacgatcattagctaccacgcggaccaccaggctatatccggcggagtagctctcaccccataccgcgtcaacaatgcgttctggcgcatgggagcgcagttccgccagttgttcgcaatcggcgcggtgtacactaataccgcgcccctgggtaatgaagccgacaatctcatctccaggaatcggctggcagcagcgcgcgatgtggtgcatcaggttgccaacaccttcgactaccacgcgaccgttatctttactgcggttttgcggcgtgtagcttttttgctgaagttgcttcagcgcggcggcgtcctgctcttcggcactcggcttattaaattggctttgcaggaagttcaccatctgattgagacggatatccccgccaccaatcgccgccagcaactcgtcgacatcattgaagttgtaacgcggcagcagatgtttttctgcttctttcaggctgatccccagatgttccagctcgtcgtcaaggatttgccgcccagccagaatgtttttgtcacggtcctgtttacggaaccaggcgtgaattttgctacgcccacggctggttgtgacgtaaccgaggtttgggtttaaccagtcacggctggggttcggctgtttctgggtgataatttcaatctggtcgcccatctgcagctggtaggtgaacggcacaatgcgcccgccaatttttgccccgatgcagcggtgtccgacatcactgtggatgtggtaagcgaagtccagcggcgtacttcccgcaggcaaatcaacgacatcacctttcggcgtaaagacgtacacccggtcgtcaaagacctgactacgtacttcgtcgagcatttcgccggaatcagccatctcttcctgccacgcaatcagtttacgcagccaggcaatccggtcttcatgtccgctacgtgcgccgccagcagccgcgccctctttatatttccagtgcgcagcaacacccaactctgcatcttcatgcatctgtttggtgcggatttggatctcaacggtttttccacccggccccagaaccacggtatgaatagactgataaccgtttggtttcgggttagcgacgtaatcgtcaaactcatccggcaggtggcgatagtgagtgtgcactatccccagtgcggcatagcaatcctgtaaacgctcggcgacaatacgtaccgcacgcacatcaaacagctcatcaaaggcgaggttctttttctgcattttacgccagatgctgtagatgtgtttcggacgaccatacacttccgctttaacgccttcagctttcatctcagcgcgcagatgaccaacgaactcttcgatgtagtgttcgcggtcgagacgccgttcatgcagcagtttggcaattcgtttgtattcggttggatggaggtaacggaagcagtaatcttccagttcccatttcagttgtccgattccgagacggttagccagcggtgcgtagatgttggtacactcttttgccgccagtacacgttcatcttccggcgcatcttttacttcgcgcagatgagcaatacgctccgccagtttgatgactacgcagcgaaaatcatcgaccatcgccaataacatccggcgaacgttatcgacctgttcggaggaaacagaatcagtgtgcgtcgctttcagctggcggatcgccgccatatcacgcacgccgtgaataaggttaacgacgctcttaccgacgctctcacgcagcacatcttcgctgactacgttggcatccgccagagggaaaagcagcgccgcccgcagcgtgtcaatgtccatacttaatgtgctgaggatctccaccatctcaacaccacgccacaataacagactggcatccggatgcccctgcgtctgttgcagacaatacgcccaggtttcggctaagcactcacagctcttctggctggtaatacccagacttgcgatccatttttccggatcaaattcaccagccttattgatatgtgcacttcttaccgcaaccatcgtcctctcctttagggaccagacctgccgaaatcggcaaatcgcaattatttaacgcggctgaaaagtaccatgctttccagatgtcccgtgtgtgggaacatatccagcatcgccagtcgcgcaatggtatatcctgcttttaataacgcttcgctatcccgagccagcgttgcagggttacaggatacataaactatacgaataggttccagttttataatttgctgcataacacctgcggcacctgctcgcgccgggtccagcaacactttatcgaagccgtttttcgcccacggctgctttgtgacatcttcttcaagattttcgtgataaaacgtcacattctgtaagccattaagacgcgcattctgctggcctttttccaccagcgccggaacaccttctacaccgaccacactggcagcttgtgtcgccaatggcagtgtaaagttgcccataccgcagaacagatccagtacgcgatcttcaggttgcacatccagccattccaacgcacgcgctaccattttttggttcacacccgcattgacctgaataaaatcgcgcgggctaaaagttaagcgcaacccgttactgtcataccagggcatctcaccagagacggtttcgagtatctcactatcgggggcgagatacagatccaggccttcagaatggctaaagcgttccagtttttcgcgatctgcgctacttagcggtgcggtatggcgcaaaatcatcagcgtgccgctggttgcctgtaccagttcaacatgaccaagatggcgcatagcttgtaagctgcccagacatgccctgactttgggcagcaatgcttcaagttggggcgctaaaatggggcattgtttgacgtcgacaatgtcactggagcccgctttgcgaaaccccatctgaagttgctgtgttttcggtaagtagttcagacttaaacgcgcgcgacggcgatagccccagggaacatcggcgatcacttcagagacatcgtgtttcattaatcgggcgagtgccgcacttttgcttcgctgctgtaaatccacgctggcgtgttgttgctgacagccaccgcatacgccaaaatgaggacagcgtggcgtttcgcgttccgggctatcgcttaaccggcgtacgactttagcgcgggcatactgttttttatcttcagtaacagtaacttccgcgttttcctgcggcaataatccggggataaatagcgttttgccgttatgtcgcgccacgccctgaccaaaagagtcgaggtcgttgacactaacggttatgatctgacgcgtcgtcgtgcgtcgttttgcagagtagaattgcgccattggcgagactttctcaatttaacagtgtgaccttaattgtcccataacggaactccatgaccaactacagcctgcgcgcacgcatgatgattctgatcctggcaccgaccgtccttattggtttattgctgagtatctttttcgtcgtgcatcgctataacgacttgcagcgtcaactggaagatgccggtgccagcattattgagccgcttgcagtttctactgaatatggcatgagcctgcaaaatcgcgaatctatcggtcagttaataagcgtactgcatcgtcgccattccgatattgttcgcgcgattagcgtttatgatgaaaataaccgactctttgtcacctccaattttcatcttgatcccagtagtatgcagctcggcagcaacgtgccgtttcctcgccagctcactgtcactcgtgacggcgatattatgatcctccgcacgccgattatttctgagagttactcccccgacgaaagccccagtagcgatgccaaaaatagtcaaaatatgttgggatatattgcgctggagctggatcttaaaagcgttcgcttgcagcaatataaagagatctttatttccagcgtgatgatgctgttttgtatcggtattgcgcttatttttggctggcgcttaatgcgcgatgtaaccggtccgattcgcaacatggtgaataccgtcgaccgcatccgtcgcgggcaactcgacagccgggtggaaggatttatgctcggcgagctggatatgctgaaaaacggtatcaacagcatggcaatgagcctggctgcttatcacgaagagatgcagcacaatatcgaccaggcgacgtccgatctgcgtgaaacgctggagcagatggaaattcagaacgttgagttagatctggcgaaaaagcgcgcccaggaagcggcgcgtattaaatccgagtttctggcaaatatgagtcacgagctgcgtacaccactgaatggtgttattggctttacccgcctgacgctgaaaacagaattaacaccaacgcagcgcgatcacctgaatacgattgaacgtagcgcaaataatttgctggcaattattaatgatgttctcgacttcagcaaactggaagcaggtaagctgattctggaaagtattccattcccactacgcagcacgctggatgaagtcgttactctgctggcacattcttctcacgataaagggttagaactgacgctcaatattaaaagcgacgtgcctgataacgtgatcggcgacccgctgcgattacagcaaatcatcactaacctggtggggaatgcaattaaattcaccgagaatggcaacattgatattctggtagaaaaacgtgcgctgagtaataccaaagtgcagattgaagtgcagattcgggataccggcattggtattcctgaacgcgatcaaagccgcttattccaggccttccgacaggctgatgccagtatttcccgccgtcatggtggcaccgggctggggctggtgattacacaaaaactggttaatgaaatgggcggcgatattagcttccatagccagccgaatcgcggtagtactttctggttccacattaatctcgatctgaacccgaacattattatcgaagggccatccacccagtgcctcgcaggtaagcgcctggcctatgtcgaaccaaactccgcagcagcgcaatgcacgctggatattttaagtgaaacgccgctggaagtggtttatagcccaacgttctccgcgctgcctcccgcgcattacgacatgatgttgttaggcatcgcggtgaccttccgcgagccgctaacaatgcaacatgagcgattagcgaaagcggtaagcatgaccgatttcctgatgctggcacttccttgccatgcacaagtcaatgctgaaaaactcaagcaagatggtatcggcgcgtgtctgctgaaaccattaacacctacacgcctgttgcctgccctgacggaattttgtcatcacaaacaaaacacgcttttgcctgtaaccgatgaaagtaagctggcaatgacagtcatggcggttgatgacaaccccgctaacctgaaacttatcggcgcattgctggaagatatggtgcaacatgtggaactttgcgatagcgggcatcaggcggttgaacgggcgaaacagatgccgttcgatttgatcttaatggatattcaaatgccggacatggatggcattcgggcctgcgaactcatccaccaactcccgcatcagcaacaaacgccggttatcgcggtaacggcgcatgcaatggccgggcaaaaagagaagctgcttggcgcagggatgagcgattatctggcgaaaccgattgaagaagagcgattgcataatttgttgttgcgctacaagcctggcagcggtatttcctctcgcgtcgtgacgcccgaagtcaacgaaattgtggtgaacccgaatgcgaccctcgactggcaactggcactacgccaggcagcaggaaaaaccgatttagcgcgcgatatgctgcaaatgttactcgatttcctgcctgaagttcgcaacaaagttgaggaacagctggttggagaaaacccggaaggcctggttgatttgattcataaactgcatggcagttgcggctatagcggtgtgccacgtatgaagaatctctgccaactgatcgaacaacagctacgtagcggtactaaagaagaagatttggaaccggagctgctggaactgttggacgagatggataatgtcgcgcgcgaagccagcaaaattctcgggtaatggatgtcttgtcgagtagcaatcggctttttatgacgctggtttcagattggtgacaaagtgcctgtgtttatgccggatgcggcgttaacgccttatccggcctacaaaaccaattaaattcaatgaattaaaaaatgatgtagacctgatacatagcacaacaggctattttgcgtttagcatcagtctcaaaccggctccagatagagccggttttggttttctgtcttaacgcaccatgcacgggcgcttgttatcgaacgtccagccaggaatcagatactgcattcccatcgcatcgtcacgcgcgccaagcccgtgtttctgatacagctcatgggctttcatcacttgatccatatcgatttctacacccagccccggtttttctggcacctgtaccagcccgcctttgatctcaaacggttctttggtcaggcgctgattgccttcctgccaaatccagtgcgtatcaatagcagtaattttacccggtgcagcggcggcaacatgggtaaacatcgccagggaaatatcgaagtggttgttagagtgactaccccaggtcaggccaaattcatggcacatttgcgccacacgtacgctaccttgcattgtccagaaatgcggatccgccagcgggatatcaacggattgcagggagagcgtatggcccatttgccgccagtcggtggcgatcatattggttgcagtcggtagacctgtcgcgcgacggaactctgccatcacttcacgcccggagaaaccttgctccgcaccacacggatcttctgcataagccaggctacctttcaggtatttaccgattttaatcgcttcgttcaggctccaggcaccgttaggatcgagcgtaatacgcgcctgcgggaagcgttgcgccagtgccacaatagactcggcctcttcttccccggccagtacaccgcccttcagtttgaaatcgttgaagccatatttttcatatgccgcttccgccaggcgcaccaccgcatccggcgtcatcgcttcttcatgacgcaggcgataccagtcgcaactgtcatccggctggctttgatacggcagcggcgtggctttgcgattaccgacgaagaacagataaccgagcatttcgacttcgctacgctgttgaccatcgcccagcaggcttgccacgtttacccccagatgctgccccagcagatccagcattgccgcttctatcccggtaactacatgaatagtggtacgtaggtcaaatgtctgcaaaccgcgcccaccagcatcacgatcggcaaaagtattacgcaccagcgtcagaacgtttttgtattcacccagcgttttacctaccaccagcggaatcgcatcttccagcgttttacggattttctcgccgccgggaatttcccctacgccagtgtgaccagaattatctttgataatcacaatattacgcgtaaagaacggtgcgtgtgcaccactcagattcatcagcatactgtcatgacccgccaccgggataacctgcatttcagtaacaacaggcgtcgtaaattgagaactcatatttatgtcctttttcagaatcaatgacggccgaaaacgggacgtttacggtcaaaggtccagccggggatcaggtactgcatcggacctgcgtcgttacgcgcaccgccaggcagacgtttataggcctcatgtgccttttgtacctgttcccagtccagttccacgcccagaccgggcgcatcaggaacggcaatttttccgtttttaatctccagcggattttgggtcaggcgacaatcgccctcctgccaaatccagtgggtatcgatagcggtaggattacccggtgccgccgcgcccacatgggtaaacatcgccagagagatatcgaaatggttattagaatggcagccccaggtcagcccccagtcgtcgcaaagctgcgccacacggactgcaccggaaagcgtccagaagtgcggatcggcaagtggaatatctaccgcattgagcatcaccgcatgacccatttcgcgccagttggtggcgatcatgttagtcgcgacgggcaagccggtcgcccgtcgaaattccgccatcacttcacgtccggagaagccctgttctgcgccgcatggatcttcggcataggtaagaacatcattcagccctttgcataaagaaatggcttcatcaagcagccatgcaccgttgggatcaacggtaatccgcgcatccgggaagcgtttcttcaatgcacgaacagtgtcgatttcttgctcgccaggtaacacgccgcccttaagtttgaaatctttaaagccgtagcgatcctgactggcttccgccagacgcacaacggcttcgctgttcattgctttctgatgccgcaactgataccactcatggttgcccggcgtattttccacataaggaagatcggttttggtccgatcaccgatataaaacagataaccgaggacggtaatagcctcgcgttgcttgcctggccctaacagttcgcagaccggaacattcagcgccttacctagcaggtcaagcaaagcggcttccagcgccgccacggcgttaacgcgtaattcaaaggtccaggcacctttaccgaaggtatcaaaatcggcggcctgattacctttatgcacctgctggaccactttattcagtcgcgcaacttcctggcccagaaccatcggaatagcatcgacaagcgtctgataaatcacatctccgcccggcgcttcaccaatgccggtatgcccggcgttatcggtgagtaccacaatattgcgggtgaaatatgcgttatgtgccccaccaatattaagcaacatgctgtcatgcccggccaccggaatgactttcatatcagtaataacaggactggattgtgtcgccatcttattgccccgcaacaggtttcaactcgatacgcttgatatcgcccaccagcaccaggtagctcagtaccgcgattaaggcatgaacaccaacataaatcagcgccccattaaagctgccagtcgtgccaacgatataaccaattgcgattggcgtgacgatgccagaaatgttaccgaacatgttgaacaggccaccggaaagaccgctgatctcttttggcgcggtatctgccattactgcccaacccagcgccccgatgcccttaccgaagaaggccagcgccataaagccgatgatcatccactcaacgttgacgtagttgcagaacaccatcaccatgctcagcaacatgcccattacgatcggtgttttacgcgcaatgttcaggcttcccgtgcggcgcatcagccagtcggaaataatcccacccagcacaccgccgataaaaccgcaaaccgccggaacggaagccacaaagcccgctttcagaatgctcatcccgcgtgcctgcaccagataaaccgggaaccaggtaataaagaagtaagtcagggcgttgatacagtactgaccgatataaacgccgatcatcatccgactccctagcagctgtttgatctgcccccacttcacgctgaacggcactttaactttggtgttttgctgatccatattgatcagcgcaccacccgcggcgatgtactccagctctttcttatttacccccggatgttgatttggctcgtggatgactttcaaccagataaagctgatgacaatccccagaccgcccataaagaagaagacgtgactccagcccacttcatgcgtcagccagcccataatcggcgcgaagatcaccgttgcgaagtattgagcggagttaaaaatgctcaccgccgttcccctttcctgcgccggaaaccaggccgcaacaatgcgactgttgccggggaaagatggcgcttcagcaagcccgaccaggaagcgcagcgtaaacagggcaacgataatgccgaatccactaaagatatcgacgaagccttgcagcaaggtaaacatgctccagataaagatgctccagaagtagacgcgtttactaccaaaacggtccagcaaccagccaccagggatctgcccgataacataagcccaactgaaagcagagaacacatagcccattcccacgggatcaaggccgatatctttggccatttcgctaccggcgatagagagcgtagcgcggtcgccgtagttgaaggatgtgacgataaacaacatcaccactatccagtaacgagcatttgtgcgtttttccacactgctcgcagcctgacttaaagaactcattgttgcactcctgaaaattcgcgttagccacgctcactctggactgcgacatcgccaggaaatcagaggtgacgtagggtgttttttgccgtttttataggtcgttcgccgaatacggcgcgtgtttatatctggcaatagcagtataaaaagcgcgccatagcggctcaccgtgcaacaacacaacattaatgcgttcaatgaggcccgattttggcattagccctggacggtggaatccacttcacggaaatgaaaacaagaacaagaaaggaagggttaaaacgaagaaataaagaagagtatgaaatggatcgcttgactccaggcaaacgccagtaaaaatccgcgctatgaagcagtttttactggcatttgcctgaaaagattcgattcagcaccgctaaaacgacatttaccgctcgctgaacatatcaggacaacagcgtgccccactgttcgacccacggattactttccgtttccggttccgggttctcactggcgtcaatcaacagcatttcgccaacccgctgagcgctctgttcctgcaacaaggcatcgaactgtttgccgccattgcagaaattcacataactactgtcgccgagcgcaatcacgccataacgcagattcggctggaagcccagactatctttgattccctgaaagagtggcacaatgctatcaggaaggtcgccctgcccggtcgtggacgtaaccaccagaacatacttatcctgatagggcagccagtcgcttaattcaggatcttcaaataccgttgctttgtggccctgcgcggtcagaatcgcttccgcttcttcggccactaacagactattcccgtacatggtgccgacaaaaataccaatttccgccataccgttttctccctggattaggaacttatctctccatcctgaccgcttggcgcactgaactcaaccctttcattttcaggaagcagaccgcgccagccaaattgacttaacgcctgcatccaggtgtcgtccaggcccgcgtgaatagtcagcggctcgccagtaaaaggatgcgtcaaactcaactgactggcatgtagcattaaccgctggaggccaaaatgctcagcaccgctgcgattctggcgtaaatcgccatgtttgctatcgccaataatcggatgacgcaaatgggcaagatgtcggcgaagctgatgtttgcgtccggttttcggctccagttccaccaggccgtagcgcgtggtcgggtaacgtccggtcgctaccggcatttctacggtcgccagaccgcgataatgcgtcactgctggctgcgggcctttatcttcgcgggcaaatttatcagcgattttgtccagttcttccaccagtggataatccagcaccgcttcttccatcaaccagccgcgcacaatcgcatggtaacgtttctggatttggtgctgttcaaactgttgtgccagcagccgtccggcctcgctggataatcccatcaacaacacaccagaagtgggtcggtccagacgatgagcagtaaaaacatgctggcctatctggtcacgcacggtttgcatgaccactactttctcgtcgcgatccagccagctgcggtgaaccagccagccggagggtttatttaccgcaaccagccattcatcctgatagagtatttccagcattagctcgcatcatccgcaaaaagagcatccagtttttccagctcagccagaataagcgcgcgttgcggatggtccgtcgccagcgccatttcataatagggtgcaacggcaaaagcgcccggtaacggctgtttgttatctaacaaatcgtgcattcgcgggatcagcacccactgcaaccactccagtggttccatggtgtccataaagaacggttgggtactattaaattgatgcggctggggttcatcgtttcgccagtgctgatgttcacgcagtaacgcttcaagcgcctgcaactggagacgaacgcggtcatgagtggtcataaagcaacctcaataagaaaaactgccgcgaaggatagcaggaataaaaaaagggagcactgtattcacagcgctcccggttcgtttcgcagcattccagctacttttgttgctccctgctcatccttgacaacttttcctctggccttgcggccaatcgttcatcctgaactattgcttcctgctcacaccaccccgatgtgatacttcatcctgaagtgtccctggccttcctgacccaccgaatcatcctgaccggttctcattctccatcctggaggtgtcctttaacgcgtcctgcgtcatcctcttcgcttcatccagaagcctttccctgaaacaccatcctggtgtgtcctgcagaagtgtcatcatcctgatgttcacttcgttgtctgactccctgtcgacgaagatagaatcgtctttttcgcgaagtcttacaaggcgcttacagacaatgccttaaggaaaatttcatatgaaagttaagaattaacaatcaacattttgattttaaatgaaaataacgattcttatctttttaagtattcgcttatttcctggcgatctcctacagagtctgtaagagatctctcacaaccagatggggtatttggattacagaagaggcttaagttgattaaggaattccgcaagattactggctaaatgcgtccgtttacgtgttcccagcgtctctttgcacacttcaccggagagattacacacgctgatgacctctaactcttcttccagcgtcgcgataaatagtgtgggcggcagttttagccttttctgagtcaccagatgaccaatcagattttcctgcacccgacggaagtcgtcttcactccaggtttgcagcaatgtcagtttgatatcgccaaactgcgcgtgcatatccccggcaaactgagtcgtataaaaggtatgaattgtgggttgtatcacaatatcaaaagcgcgttcaaccgcgtttacattttgttccccggtaaacggctggggttgccagtatacggcatcttcggtagtactaataatgcacggactaggaacaccgtacagttcctcacttaacggccagcttttatgctcttcatgccacgcatcgcagtagcgtgcagtaaaatctttcagggcttgtgcggtcaaatcgtccactaatttctctcttcacttaaaccagatacacttgtcgtttagtttatctggtttatgacggtgaaacatgtcttcttatgcaaaccatcaggcacttgcgggcctgactcttggaaaaagtaccgattaccgggatacctatgacgccagcctactgcaaggcgttccacgcagcctgaatcgcgacccgctgggtctgaaagcggataacctgccttttcacggtacggatatctggacgctgtatgaactttcctggctgaatgcgaaaggtttgccgcaggtcgctgtcggtcatgttgaacttgattacaccagcgtaaatctgattgagagcaagagttttaagctctatctcaacagttttaaccagacgcgttttaataactgggatgaggtgcgccagacgctggagcgcgacttaagcacttgcgctcagggtaagattagcgtggcgttatatcgtcttgatgaactggaaggccagccgataggtcattttaatggcacttgcattgatgaccaggatatcactatcgataactatgaattcactactgactatctggagaatgccacctgtggtgaaaaagtagtggaagagacgcttgtcagccacctgctgaaaagtaactgcctgatcacccatcaaccagattggggtagcctccaaattcagtatcgtggacgccaaattgacagagaaaaactgctgcgttacctggtcagtttccgtcatcacaacgagttccacgaacagtgcgtggaacgcatctttaatgacctgttacgcttctgccagccagaaaaattgagcgtttacgcacgttatacccgtcgtggcggtctggacattaacccgtggcgcagtaatagcgattttgtcccaagcaccacaagactggttcggcaataaattttttctcaattttgcgtgctggattcacgcagaaggttgtgaaaggtcatcaggcagggctattgtaatcaaagggaatgacgatattcgtcccataaggagtttttcttgattacacatattagcccgcttggctccatggatatgttgagccagctggaagtggatatgcttaaacgcaccgccagcagcgacctctatcaactgtttcgcaactgtagtcttgccgtactgaactccggtagtttgaccgataacagcaaagaattgctgtctcgttttgaaaatttcgatattaacgtcttgcgccgtgaacgcggcgtaaagctggaactgattaatcccccggaagaggcttttgtcgatgggcgaattattcgcgctttgcaggccaacttgttcgcggtcctgcgtgacattctcttcgtttacgggcaaatccataacaccgttcgttttcccaacctgaatctcgacaactccgtccacatcactaacctggtcttttccatcttgcgtaacgctcgcgcgctgcatgtgggtgaagcgccaaatatggtggtctgctggggcggtcacagtattaacgaaaacgagtatttgtatgcccgtcgcgtcggaaaccagctgggcctgcgtgagctgaatatctgcaccggctgtggtccgggagcgatggaagcgccgatgaaaggtgctgcggtcggacacgcgcagcagcgttacaaagacagtcgttttattggtatgacagagccgagcattatcgccgctgaaccgcctaacccgctggtcaacgaattgatcatcatgccagatatcgaaaaacgtctggaagcgtttgtccgtatcgctcacggtatcattatcttccctggcggtgtgggtacggcagaagagttgctctatttgctgggaattttaatgaacccggccaacaaagatcaggttttaccattgatcctcaccggcccgaaagagagcgccgactacttccgcgtactggacgagtttgtcgtgcatacgctgggtgaaaacgcgcgccgccattaccgcatcatcattgatgacgccgctgaagtcgctcgtcagatgaaaaaaagcatgccgctggtgaaagaaaatcgccgtgatacaggcgatgcctacagctttaactggagtatgcgcattgcgccagatttgcaaatgccgtttgagccgtctcacgagaatatggctaatctgaagctttacccggatcaacctgttgaagtgctggctgccgacctgcgccgtgcgttctccggtattgtggcgggtaacgtaaaagaagtcggtattcgcgccattgaagagtttggtccttacaaaatcaacggcgataaagagattatgcgtcgtatggacgacctgctacagggttttgttgcccagcatcgtatgaagttgccaggcagtgcctacatcccttgctacgaaatctgcacgtaatctccgctcccccggtgacgtttgttgccgggttttctcgtttttggtcacttactcatcaactcatttcatttgttatatgaatgtttcttaccaccctcacgcgacaaatatcatcacagttaatatgtcatacaatttatgttgcaacgcaaacgtttccctattttcataaaccgtattttatcgctatgaaaaagaaattatcgccatgattaactaaaagtattgattttttcagttcaacctacatatattgcgcgccccggaagaagtcagatgtcgtttaatgggcaaatattgcccttaaattctcttttacttttgatttacagagtaaagcgttgggataatctatcttccaagtagattattgtatttgagatcaagatcactgatagatacataacttgtgtgtatctttccgccctcaaattattacggcggtaaatgattaagccatcgccgatagacagatttcatttttacggtcaggcaccttcccgggctgaactggctaaaagctgaattatttgcattcctccaggagaaatagatggaaacgactcaaaccagcacgattgcgagcaaagactctcgtagtgcctggcgcaagacagacaccatgtggatgctgggcctttacggcacggcaatcggcgcgggcgtgctgttcctgccaatcaacgccggtgttggcggtatgatcccgctgatcatcatggctatccttgcgttcccgatgacgttttttgctcaccgcggcctgactcgcttcgtactgtctggtaaaaacccgggcgaagacatcaccgaggttgtagaagaacactttggtattggcgcaggtaaactgattaccctgctctacttcttcgctatctacccgatcctgctggtttatagcgtggcaatcaccaataccgttgaaagcttcatgtctcaccagctgggtatgacgccaccgccgcgtgcgattctgagcctgatcctgatcgtgggtatgatgaccatcgttcgcttcggtgagcagatgatcgttaaagcgatgagtattctggtattcccgtttgttggcgtactgatgctgctggctctgtacctgatcccgcagtggaacggcgctgcactggaaacgctgtctctggacactgcatctgcaaccggaaacggtctgtggatgaccctgtggctggcaattccggtaatggtgttcagcttcaaccactctccgatcatctcttctttcgccgttgcgaagcgtgaagagtacggcgatatggcagaacagaaatgcagcaagatcctggcattcgcacacatcatgatggtgctgaccgtaatgttcttcgtcttcagctgtgtactgagcctgactccggcagacctggctgcggctaaagagcagaacatcagcattctgtcttacctggctaaccactttaacgcaccggttatcgcgtggatggctccgattatcgcgattatcgctatcaccaaatccttcctcggtcactacctgggcgcacgtgaaggcttcaacggtatggtgattaaatctctgcgtggtaaaggtaagtctatcgaaatcaacaagctgaaccgtatcactgcgctgttcatgctggtaacgacctggattgttgccaccctgaacccgagcatcctgggtatgattgaaaccctgggcggtccaatcatcgcgatgatcctgttcctgatgccgatgtacgcaattcagaaagtaccggcaatgcgtaagtacagcggtcacatcagcaacgtattcgttgtcgtgatgggtctgattgcaatctccgcaatcttctactctctgttcagctaagtcctttcgcgccgctttcgggcggcgcttcctccgttttaacgcgatgtatttcctatgattagcgtattcgatattttcaaaatcggcattggcccttccagttctcataccgttggaccaatgaaagcgggtaaacaatttaccgacgatctgattgcccgtaacctgcttaaagacgtgacccgcgtggtggttgacgtgtacggcagcctctctctgaccggtaaaggccaccacactgatatcgccattattatgggcctggcgggtaacctgccggataccgtggatatcgattccatccccagttttattcaggatgtgaatactcatggtcgcctgatgctggcaaacggtcagcatgaagtggagttcccggttgatcagtgcatgaacttccacgccgacaacctttctctgcatgaaaacggtatgcgcattaccgcgctggcgggcgataaagtcgtttacagccagacttactactctattggcggtggctttatcgttgatgaagagcattttggccagcaggatagcgcaccggttgaagttccttatccgtacagtagtgcagccgatctgcaaaaacattgtcaggaaaccgggctgagtctctctggcctgatgatgaaaaacgagctggcgctgcacagcaaagaagagctggaacagcacctggcgaacgtctgggaagtcatgcgcggcggtattgagcgcggtatttccaccgaaggcgtgttgcctggcaaactgcgcgttccacgccgtgctgcggcactacgccggatgctggtcagccaggataaaaccaccactgacccgatggcggttgttgactggatcaacatgtttgcactggcagtgaacgaagagaacgctgctggcggtcgcgtggtgactgcgccgactaacggtgcgtgcgggattatcccggcagttctggcgtactacgacaagtttatccgcgaagtgaacgctaacagtctggctcgttacctgctggtagccagcgccattggttctctttataagatgaacgcgagcatttctggtgctgaagtgggttgccagggtgaagttggcgtggcgtgcagtatggcggcggctggtctggcagaactattaggcgcaagcccggcgcaggtgtgcatcgcggcggaaatcgccatggagcacaacctcggtctgacgtgtgacccggtcgccggacaggtacaggtgccatgcatcgagcgtaacgccattgcggcagtaaaagcggtgaacgccgcacgtatggcgctgcgccgtaccagcgagccgcgcgtctgcctcgataaagttatcgaaaccatgtacgaaacaggtaaagatatgaacgccaagtaccgcgaaacctctcgcggcggcctggcaatgaagatcgttgcctgcgattaatcgctctccaaaggcctcgttttgcgaggcctcttcccgatttctcatccagccgtagcctgttccggcatcgaatgttacccttatcgcctgatctttaagggggttatcgtggctgttcatttgcttattgtcgatgcactgaatcttattcgtcgcattcatgccgttcaggggagcccctgtgtcgaaacctgccagcatgcgctcgatcagctcattatgcacagccagccaacccacgcggtcgccgtttttgatgatgaaaaccgcagtagcggctggcgtcatcagcgtttaccagattacaaagcgggtcgaccgccaatgccggaagagttgcacgacgagatgcctgcattacgcgccgcctttgagcaacgcggcgtcccgtgctggagtaccagcggcaacgaagccgatgacttagccgccacgctggcggtcaaagtgacacaggccgggcatcaggcaacgattgttagcacagataaaggctactgtcagttacttagtccgacattacgtattcgtgattacttccagaaacgttggctggatgcgccatttatcgataaagaatttggcgttcaaccgcagcagttgcccgattactggggacttgcggggatcagcagtagtaaggtaccgggtgttgcgggaatcggaccaaaaagcgccacgcagctgctggtcgagtttcagagtctggaagggatatatgagaatctggatgcggttgccgaaaagtggcgcaaaaaattagaaacccataaagagatggcgtttctgtgccgcgatattgcccgcttacaaaccgatttgcatatcgacggcaatttacagcaattgcggttggtacggtaacggcgagccggatacgccgcaaacgtcgtatccggcattatcacatcagcgcatttaccaggcggtatggtaaagctctacaatatcctcaagcgttgcttcacgcgggttgccaccggtacaaacatcatccagtgccgcctgcgccagtgccggaatgtcttccttgcgtacaccaacatcacgcaaatgtggcggaataccgacatcacggttgagagcaaacaccgcttcaacagcggcattacgcgcctcttccaggctcataccttccactttcacgcccataacgcgcgcgatatcgcggtacttctcaccggtaaagtcagcgttataacgcatgacatgcggtaacaggatggcgttcgcaacaccgtgtggagtgttataaaacgcgcccagtggatgcgccataccatgcaccaaccctaacccaacattgctgaagcccatacccgcaacatactgcccgagcgccatttcttctccggcatccttatcaccagcaacgcttcctcgcagcgccccagcaatgatttcaatcgctttaatgtgcagtgcatcggttagcgcccacgcgccacgggtaatatacccctcaatagcatgagtgagcgcatcgacacccgtcgcagctttcagcgctggaggcataccatccatcatgtcagcgtcaataaacgccacctgcgggatatcatgcggatcaacgcaaacaaacttgcgccgtttctcttcgtcagtgatcacgtagttaatggtcacttctgccgcagtacctgctgtggtaggaattgccagaatcggtacactgggtttattggtcggggaaagcccttccaggctacgcacatcggcaaactccgggttgttgctgataatgccaatcgctttacaagtatcctgtggagaaccaccaccaatagcgatcaggtaatccgcgccgctattctggaatacaccgagcccttctttgacgacagtaattgttgggttgggcactacgccgtcgtaaatcgcccatgccagccctgcagcatccatcttatcggtcactttcgccaccacgccgcattgcaccagcgttttatcggtgacgatcagcgccttctgataaccacggcgtttcacctcatcggttaaagccccaacagcaccccgaccaaaccatgccgtttcgttcagaatcattctgttagccatcatccttctccttgttgctttacgaaattactcttcaattcgtaacccataggttttgaatttctccagcactacggcaatctcttcatcgctcagcactggcaccgggtccgtaatcgccagggtcgtcaggtaaagttgcgccagcacttcaacttcatgcgccagccataacgctttttccagattcacctcacaagcgataagcccatgatgttgtaacaaagttgccttacgatttttgagagccagcgcaacatgttcagaaagttcgcgtgttccaaaggtcgcataaggcgcgcaaggaatagaattaccgccagccgccgcaatcatgtagtgaatagcggggatgcttcggttaagaatggaaactgccgtgcaatgaacggcatgattgtgaacaaccgcgttggcatccggtctgctttgataggctgccatatggaaacgccattcgctactggggagctttccttcctcatgtttaccgttgccatcaataaagacaatatggctctccgtcagtttttcatatggaatgcctgtaggcgtaatcagcatcccatcctgataacgtacactgacgttccccgctgtcccctggttcagtcccaggcgggtcatttccaggcaagtgtcaataatctgacgagcaagtttatttcgttccattagctacctctctctgattcaaaacagggcaataatgttgttcctttcacactattgaattagccgtttaattacccaccatcttcttcctgattaacaagaaagaaattcacaagcttatattttgtgacctggttcaactaatcacagtaaataactgcaagttctctttttataaccccattaaaaatgaccgctcttaaaaatatttatcaaaacggtcatttttctattcctccaagcccggaatgaccgttttcggcacaaacaattaatacggtcatctgatttgtgttttttatgatttattttctgaaacgggcatgaaatttcgattattaaagtgatggtagtcacataaagtcaccttctagctaataagtgtgaccgccgtcatattacagagcgttttttatttgaaaatgaatccatgagttcatttcagacaggcaaatattcactgatatgaagcccgaactcgctggttttgcacttttgaaaacataaccgattacgtgcttaagcttctgaacctaagaggatgctatgggaaacacaagtatacaaacgcagagttaccgtgcggtagataaagatgcagggcaaagcagaagttacattattccattcgcgctgctgtgcagtctgttttttctttgggcggtagccaataaccttaacgacattttattacctcaattccagcaggcttttacgctgacaaatttccaggctggcctgatccaaagcgccttttactttggttatttcattatcccaatccctgctgggatattgatgaaaaaactcagttataaagcagggattattaccgggttatttttatatgccttgggtgctgcattattctggcccgccgcagaaataatgaactacaccttgtttttagttggcctatttattattgcagccggattaggttgtctggaaactgccgcaaacccttttgttacggtattagggccggaaagtagtggtcacttccgcttaaatcttgcgcaaacatttaacagctttggcgcaattatcgcggttgtctttgggcaaagtcttattttgtctaacgtgccacatcaaagccaagacgttctcgataaaatgtctccagagcaattgagtgcgtataaacacagcctggtattaagcgtacagacaccttatatgatcatcgtggctatcgtgttactggtcgccctgctgatcatgctgacgaaattcccggcattgcagagtgataatcacagtgacgccaaacaaggaagcttctccgcaagcctttctcgcctggcgcgtattcgccactggcgctgggcggtattagcgcaattctgctatgtcggcgcacaaacggcctgctggagctatttgattcgctacgctgtagaagaaattccaggtatgactgcaggctttgccgctaactatttaaccggaaccatggtgtgcttctttattggtcgtttcaccggtacctggctcatcagtcgcttcgcaccacacaaagtcctggccgcctacgcattaatcgctatggcactgtgcctgatcagtgccttcgctggcggtcatgtgggcttaatagccctgactttatgcagcgcctttatgagcattcagtacccaacaatcttcagcctgggcattaagaatctcggccaggacaccaaatatggtagctccttcatcgttatgaccattattggcggcggtattgtcactccggtcatgggttttgtcagtgacgcggcgggcaacatccccactgctgaactgatccccgcactctgcttcgcggtcatctttatctttgcccgtttccgttctcaaacggcaactaactgaacatattttccgaataaagtgaggaatctgtaatgaaaaaaatcagcttaccgaaaattggtatccgcccggttattgacggtcgtcgcatgggtgttcgtgagagccttgaagaacaaacaatgaatatggcgaaagctacggccgcactgctgaccgagaaactgcgccatgcctgcggagctgccgtcgagtgtgtcatttccgatacctgtatcgcgggtatggctgaagccgctgcttgcgaagaaaaattcagcagtcagaatgtaggcctcaccattacggtaacgccttgctggtgctatggcagtgaaaccatcgacatggatccaacccgcccgaaggccatttggggctttaacggcactgaacgccccggcgctgtttacctggcagcggctctggcagctcacagccagaaaggcatcccagcattctccatttacggtcatgacgttcaggatgccgatgacacaagcattcctgccgatgttgaagaaaaactgctgcgctttgcccgcgccggtttggccgtcgccagcatgaaaggtaaaagctatctgagcctgggcggcgttagcatgggtatcgccggttccattgttgatcacaacttctttgaatcctggctgggaatgaaagtccaggcggtggatatgaccgaactgcgtcgccgtatcgatcagaagatttacgacgaagccgaattggaaatggcactggcctgggctgataaaaacttccgctatggcgaagatgaaaataacaaacagtatcaacgtaatgccgagcaaagccgcgcagttctgcgcgaaagtttactgatggcgatgtgtatccgcgacatgatgcaaggcaacagcaaactggccgatattggtcgcgtggaagaaagtcttggctacaacgccatcgctgcgggcttccaggggcaacgtcactggaccgatcaatatcccaatggtgacaccgccgaagcgatcctcaacagtagttttgactggaatggcgtgcgcgaaccctttgtcgtggcgaccgaaaacgacagtcttaacggcgtggcaatgctaatgggtcaccagctcaccggcaccgctcaggtatttgccgatgtgcgtacctactggagtccagaagcaattgagcgtgtaacggggcataaactggatggactggcagaacacggcatcatccatttgatcaactccggttctgctgcgctggacggttcctgtaaacaacgcgacagcgaaggtaacccgacgatgaagccacactgggaaatctctcagcaagaggctgacgcttgcctcgccgctaccgaatggtgcccggcgatccacgaatacttccgtggcggcggttactcttcccgcttccttaccgaaggcggcgtcccgttcaccatgactcgtgtcaacatcatcaaaggcctgggaccggtactgcaaatcgcggaaggctggagcgtggaattgccgaaggatgtgcatgacatcctcaacaaacgcaccaacagtacctggccaaccacctggtttgcaccgcgcctcaccggtaaagggccgtttacggatgtgtacagcgtaatggcgaactggggcgctaaccatggggttctgaccatcggccacgttggcgcagactttatcactctcgcctccatgctgcgtatcccggtatgtatgcacaacgttgaagagaccaaagtgtatcgtccttctgcctgggctgcgcacggcatggatattgaaggccaggattaccgcgcttgccagaactacggtccgttgtacaagcgttaatacattactccctgatgtgatgcccggtcgctccggctaccgggcctgaacaagcaagagtggttagccggataagcaatgttatccggctatattgcaggagcgattatgaaacaagaagttatcctggtactcgactgtggcgcgaccaatgtcagggccatcgcggttaatcggcagggcaaaattgttgcccgcgccagtacgcctaatgccagcgatatcgcgatggaaaacaacacctggcaccagtggtctttagacgccattttgcaacgctttgctgattgctgtcggcaaatcaatagtgaactgactgaatgccacatccgcggtatcgccgtcaccacctttggtgtggatggcgctctggtagataagcaaggcaatctgctctatccgattattagctggaaatgtccgcgaacagcagcggttatggacaatattgaacggttaatctccgcacagcggttgcaggctatttctggcgtcggagcctttagtttcaatacgttatataagttggtgtggttgaaagaaaatcatccacaactgctggaacgcgcgcacgcctggctctttattagcagcctgattaaccaccgtttaaccggcgaattcactactgatatcacgatggccggaaccagccagatgctggatatccagcaacgcgatttcagtccgcaaattttacaagccaccggtattccacgccgactcttccctcgtctggtggaagcgggtgaacagattggtacgctacagaacagcgccgcagcaatgctcggcttacccgttggcataccggtgatttccgcaggtcacgatacccagttcgccctttttggcgctggtgctgaacaaaatgaacccgtgctctcttccggtacatgggaaattttaatggttcgcagcgcccaggttgatactagcctgttaagtcagtacgccggttccacctgcgaactggatagccaggcagggttgtataacccaggtatgcaatggctggcatccggcgtgctggaatgggtgagaaaactgttctggacggctgaaacaccctggcaaatgttgattgaagaagctcgtctgatcgcgcctggcgcggatggcgtaaaaatgcagtgtgatttattgagctgtcagaacgctggctggcaaggagtgacgcttaataccacgcgggggcatttctatcgcgcggcgctggaagggttaactgcgcaattacagcgcaatctacagatgctggaaaaaatcgggcactttaaggcctctgaattattgttagtcggtggaggaagtcgcaacacattgtggaatcagattaaagccaatatgcttgatattccggtaaaagttctcgacgacgccgaaacgaccgtcgcaggagctgcgctgttcggttggtatggcgtaggggaatttaacagcccggaagaagcccgcgcacagattcattatcagtaccgttatttctacccgcaaactgaacctgaatttatagaggaagtgtgaaatgctgaaaacaattagcccgttaatttctcccgaactattgaaagtgctggcagagatgggacatggagatgaaattattttttccgatgctcactttcccgcccatagcatgggaccgcaggtgatccgcgctgatggcctgttggtgagcgacttgctccaggcgattatcccgttatttgaactggacagttatgcaccgccgctggtgatgatggcggcggtagaaggtgacactctcgatcctgaagtagaacgacgttaccgtaatgcgcttagtctacaagccccgtgtcctgacatcatccgcatcaatcgttttgcgttttatgaacgggcgcaaaaagcctttgcgatcgttatcacaggcgaacgagcgaagtacgggaatattcttttaaaaaaaggggtaacaccgtaatctcataccggtacgcccgcatgacgcgggcggttatcgaatgatggggtgaaaaatatgaaagcggcacgccagcaagcgatagtcgacctgctgctgaaccataccagcctgaccacggaagctctctctgaacagctaaaggtcagtaaagaaaccattcgtcgcgatctcaatgaattacagacgcagggtaaaattctgcgcaatcatggacgcgctaaatatatccaccgtcaaaatcaagacagtggcgatccctttcacatcaggctgaaaagccattatgcgcataaagcagatatcgcgcgcgaggcgctcgcgtggattgaagaagggatggtgatagccttagacgccagtagtacttgctggtatctggcacgccagttgcctgacatcaacattcaggtcttcaccaatagccatccgatttgccatgaactcggtaaacgcgaacgcattcaactgatcagttccggcggcacacttgagcgcaaatatggctgttacgtcaatcccagcctgatttcccaacttaaaagcctggaaatcgatctgtttattttttcttgtgaagggatcgatagcagcggcgcactgtgggactccaatgcgatcaacgctgattacaaaagcatgctattaaaacgtgccgcgcaaagcttgttattgattgataaaagtaaatttaatcgtagtggggaagcccgcatcgggcatctggatgaggtaacgcacattatttctgatgagcgccaggttgcaacttctttggtaacagcctgacggaaagggtagcaggccggagacgacgccccggccttgcctgttatcgctcgtcgcgacgaccacccaccgcagcccagatgcggcggacgtgcaccgtcacttcttcgcgatcgtgatacaactgccgcgcctgaatctgagcatttatgccatgttcatcaagctgtgcctgaatatacgccagattgtgactcacttcttcgtagcgttttttcatcggcagtttgaggttgaaaatggtttcacggcaccagccattaaccagccactgcgccatcaatgccgcaactttcgccggtttttcaaccatatcgcataccatccaggagatattgctgcgcgtcggacggaatttgaaaccgtcttcccgcagccacgtcacctgtccggtatccatcagactttgcgccatcgggccgttgtcgacggaataaacccacatgttgcgcttcaccagttggtaggtccagccgccagggcaagcgcctaaatccaccgcccacatcccgttcgccaggcgttcatcccactcatccgcaggaataaacacatgaaatgcctcttccagtttgagcgtggaacgactcggcgcatctgccggaaatttcaggcgcggaatgcccatatagaacgggctattattgttgctgtaactgtaaccggtatagcagcagcctggtgcaataaagaatacatgcacaaccggacgcttcggcgtttcatagttcgccagcaccccggcatcgcgcaaggcagcgcgtagcggaacagtaaatttacggcagaatttcagtaactctttgctttcgttggtatcggcaacttcaacacgcagttcaccgcccttctctactacgccctgtaacatgccgacaatgggggtaatacgatcttctggcggcaaatgctgcaggagttcccccaccacaaaccactggcgggcaaaaattaaactactgaacggcagctcacggattaacttatcgccatcatcaggttgataacattcataaatgacataacccgcattctctttcacgcgggcaaaaccgaaaatttcccgctggccggctttatcggtaatttctgcggcgcactctttttcaaagcccggacggcacagcaatacaaccttattcatgacttacgcccttgcgctttaaacggatagcaccaactaacattaacgcccagcccgcgaggaagctcacgccgccaaccggagtgacaaacgcccacaaacgcagatgggacagcgccaggcaataaaggctgccgctgaacaacaccgtgcctaacgcgaggaaaacgctactccagtaaaaccagatactgatgcgacgctgcattgccaccgccagacctaagatcgccagcgtatgaaacgcctggtattcgaggccggtctggatccagcccatctcaacggcccccatggttttacttaacacatgcgcgccaaaagcgcccagagccacaaaaatgaagccgctaatggcggcgaaaatcagcataaaacggctggtcatggtcgtaccctacgtaaattattgttcataacgaaagcggaatttttcttgttcagcagcggctttcgccaggatccattggcgaaaggcggctattttacccagttctgcctgactgtcatgacaaaccagataaaaagcatttttactgaccagaacatcattaaacgggcaaacaagacgtccggcctcgatttcagattgcgccatcacgttatttgccagcgccactccctgcccgtggatagccgcttgcagcaccatggcgctatggctaaaaattggcccttgctgaacgttgatatgatttaaccccaactgtcgggtatatgtctgccagtcacggcggctagcatcatgtaataacgtatgtttagccagatcttccggtgtcttcaagggtttttcgccagtcagcagtagcgggctacacaccggcaataaatattcggcgtacagtttttccacccgtagccccggccagttgccccgaccataaaatatcgccacatcaacatcatccgccagcttatcttcctgacgatcaaccgcctggattcgaacgtcaattcccggataagcactattaaagctggaaagtcgcggaaccaaccaatgaatggcgaaactggggagtaaactgaccgtcaacgcccccttggcgctacgggcctggagtttacgcgtcgcttcggttaattggctaaatatctctttgatatcgaggaaatagctttgcccttcctcggtcagcaggagactacgattacggcggcggaacagttttagccccaaaaaatcctcaagagacttgatttgatgacttactgcggcttgggtcacaaaaagctcttctgctgcgcgagtgaaacttaaatggcgtgctgcggcatcaaaaactcgtaaggcatttagcggtggtaatcgtttagacatggctattaaactttgatgttaaatgaatttaacaattagatcacactatgtaacctattagtttttttaatctgagccattataaattgtccgttgagcttctaccagcaaatacctatagtggcggcacttcctgagccggaacgaaaagttttatcggaatgcgtgttctggtgaacttttggcttacggttgtgatgttgtgttgttgtgtttgcaattggtctgcgattcagaccatggtagcaaagctaccttttttcacttcctgtacatttaccctgtctgtccatagtgattaatgtagcaccgcctaattgcggtgcttttttttaccttgcgatcgcgaattactgatccagttcgaccatctctttcacgtcagtacggttgatctgctgtttgttgccattagcgtctttatagctaatcataccggtatcgttatcagtctgtggtttgccgtcagagacgatggtacgtccgtcattggtgtgcatcacatagttgctaccggaacaggcgctcagggcaaaagtcagcatacaggcagaaataattgcggcagtctttttcatcatcttctccttaaagcgattaataaatcttaatagtattgattaacaggctaaaattaacgcctaacactattcagcatatgttacttacgcggcttcgccaggatatccagataattctgatggttagcactctccttgtatcaaagtgaattttgcgtcacgatcggtgcatcaagccgaggagtaccatgaacgtttttaatcccgcgcagtttcgcgcccagtttcccgcactacaggatgcgggcgtctatctcgacagcgccgcgaccgcgcttaaacctgaagccgtggttgaagccacccaacagttttacagtctgagcgccggaaacgtccatcgcagccagtttgccgaagcccaacgcctgaccgcgcgttatgaagctgcacgagagaaagtggcgcaattactgaatgcaccggatgataaaactatcgtctggacgcgcggcaccactgaatccatcaacatggtggcacaatgctatgcgcgtccgcgtctgcaaccgggcgatgagattattgtcagcgtggcagaacaccacgccaacctcgtcccctggctgatggtcgcccaacaaactggagccaaagtggtgaaattgccgcttaatgcgcagcgactgccggatgtcgatttgttgccagaactgattactccccgtagtcggattctggcgttgggtcagatgagcaacgttactggcggttgcccggatctggcgcgagcgattacctttgctcatagtgccgggatggtggtgatggttgatggtgctcagggggcagtgcatttccccgcggatgttcagcaactggatattgatttctatgcttttagtggtcacaaactgtatggcccgacaggtatcggcgtgctgtatggtaaaagtgaactgctggaggcgatgagcccctggctgggcggcggcaaaatggttcacgaagtgagttttgacggcttcacgactcaatctgcgccgtggaaactggaagctggaacgccaaatgtcgctggtgtcataggattaagcgcggcgctggaatggctggcagattacgatatcaaccaggccgaaagctggagccgtagcttagcaacgctggcggaagatgcgctggcgaaacgtcccggctttcgtagtttccgctgccaggattccagcctgctggcctttgattttgctggcgttcatcatagcgatatggtgacgctgctggcggagtacggtattgccctgcgggccgggcagcattgcgctcagccgctactggcagaattaggcgtaaccggcacactgcgcgcctcttttgcgccatataatacaaagagtgatgtggatgcgctggtgaatgccgttgaccgcgcgctggaattattggtggattaatgacaaacccgcaattcgccggacatccgttcggcacaaccgtaaccgcagaaacgttacgcaataccttcgcaccgttgacgcaatgggaagataaatatcgccagttgatcatgctggggaaacagcttccggcattgccagacgagttaaaagcgcaggctaaagagattgccggatgcgaaaaccgcgtctggctgggatatacagtggctgaaaacggcaaaatgcatttctttggcgacagcgaagggcgcattgtgcgcggcctgctggcggtgttgttgactgccgttgaggggaaaaccgccgccgagttgcaggcacagagtccactggcattgtttgatgagctgggattacgtgcgcagcttagcgccagtcgcagccaggggttaaatgcgttaagcgaggcgattatcgctgcgacgaagcaggtttaagcacagaaccgggtcggataagacgttcgcgtctcatccgacctgattgtttaaccctgacgcgccgctttcgccatcatcttcttcagcgcatgagaaaccgcaacaaacccaaaggtggcggtcaccatcgttgccgcgccaaatccagatgcacaatccatccgcttcggcccttctgccgtggctttcatcgcacacaccgtaccgtcactctgcgggtacaccagcgcttcagtagaaaacacgcaatccacgccgagcttacctttactgtttttcactacgccaaaatcgcttttcaggcgctcgcgcaacttcgccgccagcgggtcctgaatcgttttcgccagatcggtaacctgaatctgcgtcggatcaatctgcccacccgcgccaccggttgtgaccagtgggattttattgcgccgacaataagcaatcagcgccgctttgggccgtacactatcaatggcatcaatcacgtagctataacccacgctcatatactgcgctacgttatccggcgtcacgaaatcatccaccaccgttacacggcactccgggttaatctggcgaatacgctccgccataacttccgcttttgccagcccaacgttatcgcgcagggcatgaatttgccgattggtattggtgacgcacacatcatccatatcgataagcgtgattgcgccaatccccgtgcgcgccagcgcttccgccgcccaggaaccgacaccaccgataccaaccacacaaatatgcgcgtcagcaaacagttgcaacgctttttcaccatacagacgcgctgtgccaccaaaacgctgacgccatgcatcactaattaccacagacatagcacctcagaattaaaaagggcgaggttatccctcaccctaaacgcataaatgcctgatgcgctacgcttatcaggcctacataactcctgcaatattttggatttgcatgatttgtaggccggataaggcgttcacgccgcatccggcatgaacaacgcgcacttagtcaataatcaggatgtgaggttacccctcaccctgtcatatccgtaaaaacggcatacagaatatcacatcagccgctaaagacgttacctgcgcccggggcggttttcagcacccagacacgtccatagtggttgtaccaacctgcgcggtgtccggcttccggcccgatcccttgatagatatcgaagtgttggcctttgattgcaccaccgacatccagcgccaccatcagacgcagttcgtactgaccattaaatttgccgttattatccagcaacggcacttctgccagcaaggtagtacctggcggaataatggaacgatcagaggcaacactcgcgcgaccaaccagcggcaccgcacttgcccctttcaccggagcaaaagattgcggtttaaagaagacgaaagacgggttctgttccagcagctcgcgaacctcggcttcactgtgtgtttcgccccagtgacgaatcgcctgcatgctcatatcttcttttttcacttcgccacggtcgatcagcaccttaccaatgctgcgataggcatgaccgtttttccctgcatagctgaaaaagttaagcggactgccatcaccaaagtcgatatacccactaccctgcacatccataatgaagttatccatcagggagttactgtaagcgagaatatatttatcactcaatgcccccgcgtagatctccgcacgagacggcagacgaccacgttttggcggcatacggtaaataggatactggaactcgccctggcgggtatggcgcgcctgaattaccggcgtgtaataaccggtaaactgcacgttaccatagttgtcggcaccttccatctgccaggcatcaatgccgaactggcgcatattgcgggtatcaccgcctgcgcgcagccactcttgcaccgcgttataaacattactctggttgccatacagacgcggactgctattacggatatggttaatttgctcggcaaaatcaccggcgttaatcggcgcgccaacggcatctggctggttcaccagagagaaaggctgggtaaatttcccgtctttatattgctgtccgcgatcggttggtttggaagagcaggcggcaagcattgccacaaccgtgcccataagaaggtactttacccaacgtcctttcattgttctcttcttcaggttaaaaaataaggcgcaacgaagataacaaaccgccgcgtttaatgaaatgagcagcctctccctgacgcaaattttgcacaaaaaataggctttagtgatttgtttttgttcaaaatcatgccaaatccgtgatcggggtaaaaaaaaggttgcatgaaaacgcgagcggagtatagtgcgcatccacggacgcggggtggagcagcctggtagctcgtcgggctcataacccgaaggtcgtcggttcaaatccggcccccgcaaccaattaaaatttgatgaagtaaagcagtacggtgacgcggggtggagcagcctggtagctcgtcgggctcataacccgaaggtcgtcggttcaaatccggcccccgcaaccaatcaaatttgatgaagtaaaagcagtacggtgacgcggggtggagcagcctggtagctcgtcgggctcataacccgaaggtcgtcggttcaaatccggcccccgcaaccaattattgaacaccctaacgggtgtttttttgtttctggtctcccataaaaaagcgccattcagcgcctttttatcatccccttctcgccagcgtcgccccatcggcaaaatacgctttaatccccgcaagaatagactccgcaacttcctgctggaaagtcgccgttttcagtttacgctcttcctcaacgttactgataaacgccgtttcgaccagaatggagggaatatctggtgcctttagtacggcaaacccggcctgttcaacttgatttttatgcagcttgttgattttaccgagcttattcagtaccgctttaccaaacttcaggctgtcggcaatggtcaggctctgtaccatatcgaacatggtgtggtcgacatagcggtcaccgcttttgctcacgccaccaatcaagtcgctggcgttctgggtttgtgccagatattttgccgcagtactggttgcacctttggtactgagcgcaaacacagaggaaccgctcggctgacgactggtaaaggcgtcggcatggatagagacaaacaggtcagcacgctgtttctgggcttttgctacgcgcacttgcaatggaatgaagatgtcttcattgcgcgtcatgtacaccttcatattgccctctttctcgatcagagagcgcaaacggcgagctatttgcaataccacatctttttcgcgcgttttgtatttccccaccgcaccggagtcttcgccaccgtggccagggtcaagcataatgacaatcggacgatcgcgccctgctttacccggttgtggaccactttgcgctggcggcacctgcttttcgaggtcgcctttgttgtaatcctccagcagcgccagcagcgggtcctgcatatcctgtgcattggccggatagaggtccatcaccagacgctctttaaacccggcgaccggcgcaagggcaaacagctgcggttttacgttttgctttaattcaaaaaccatccgtacggtttgcgggtcaaattgcccgacgcgcgcgctcttgatgaacgggtcgtctgcacgaatttgtgccgccatccccttgagtacgctgttcaggtttacatcttcgatatccaccaccacgcgttcagggttactcaacgcgaactgcttatatttcagctgacgattactttccaccgtcacgcgggtgtagctggacgcaggccagacgcgcaccgccacgacctggctgaccgcagccagactgacctgacttacgctcaatagccacatggcacccgcgccttgcagtaaacgacgacggctgattgcagtgttggatccactcatgcctctcccgagcaaaagaaatctaagctgtgtaacaagtaaacgactaatttgaccggaaactttagcgaaagacgcataatctgtcatctaataaacggtaaacattctttttatattcacggcattactgataaaaaagtcgctctcgcataaaatttacacttgcaccctgcgaaaaaacagaataaaaatacactaatttcgaataatcatgcaaagaggtgtgccgtggtaaaggaacgtaaaaccgagttggtcgagggattccgccatagcgttccctatatcaatacccaccggggaaaaacgtttgtcatcatgctcggcggtgaagccattgagcatgagaatttctccagtatcgttaatgatatcgggttgttgcacagcctcggcatccgtctggtggtggtctatggcgcacgtccgcagatcgacgcaaatctggctgcgcatcaccacgaaccgctgtatcacaagaatatacgtgtgaccgacgccaaaacactggaactggtgaagcaggctgcgggaacattgcaactggatattactgctcgcctgagcatgagtctcaataacacgccgctgcagggcgcgcatatcaacgtcgtcagtggcaattttattattgcccagccgctgggcgtcgatgacggcgtggattactgccatagcgggcgtatccggcggattgatgaagacgcgatccatcgtcaactggacagcggtgcaatagtgctaatggggccggtcgctgttagtgtcactggcgagagctttaacctgaccagcgaagagattgccactcaactggccatcaaactgaaagctgaaaagatgattggtttttgctcttcccagggcgtcactaatgacgacggtgatattgtctccgaacttttccctaacgaagcgcaagcgcgggtagaagcccaggaagagaaaggcgattacaactccggtacggtgcgctttttgcgtggcgcagtgaaagcctgccgcagcggcgtgcgtcgctgtcatttaatcagttatcaggaagatggcgcgctgttgcaagagttgttcagtcgcgacggtatcggtacgcagattgtgatggaaagcgccgagcagattcgtcgcgcaacaatcaacgatattggcggtattctggagttgattcgcccactggagcagcaaggtattctggtacgccgttctcgcgagcagctggagatggaaatcgacaaattcaccattattcagcgcgataacacgactattgcctgcgccgcgctctatccgttcccggaagagaagattggggaaatggcctgtgtggcagttcacccggattaccgcagtagtagtaggggtgaagttctgctggaacgcattgccgctcaggcgaagcagagcggcttaagcaaattgtttgtgctgaccacgcgcagtattcactggttccaggaacgtggatttaccccagtggatattgatttactgcccgagagcaaaaagcagttgtacaactaccagcgtaaatccaaagtgttgatggcggatttagggtaagcgatgaaaatcgtcggatgcgacatgcgtaacactcgtacgtcgcatccggcaattacgtttattcccgactactaaacaacgccgccagaccactgcgccgctcagtacgagtggcgattgccgcacttaatatgcgctcatcggcatacaggctcagacggcgacgcgcgcgggtcaccgcggtataaaccagctctcgcgttactaccggcgtgcgttggctcggcaaaatcaacgccgcatggtcgaactcgcttccctggcttttatgtaccgtcatcgcccacgtagtttcgtgctctggcaagcgactcggttgcacagacttaatattgccgtccggcatcgcaaaccagacgcgcgtcccctgcccgcgatccagcgcaataccgatatcgccattaaacaacccaagcgcgctgtcattacgggcaatcatcaccggtcgaccttcgtaccaacgagagtgcggatgacgatgaattttgcgcttctgttgcataaactgctcaattcgctcattcagtccagccacgccaaacggcccttcccgcagggcgcacaaaagctggtactcattgaacgcctgaatgattaaatccggctcggcacgcgcttgcagcagatccagataacgtccgtaacccgcaagagcttcctcaagcatcgcaatataatcttcgccgctctgtaaaagccgtttttcgatatcagtaaaatcctgctgaaaaacggttttcactgccgttttatcaccacggttgatcgccgcagctaactgaccaatgccagaatcgctgccgaaacgatagcttttttgcagcaggcagagactgtcgcgcaaagatgccgcttctgtgccggttcctgccggaacgtgagtccccgtcaggcggcttagctgcctggcacgctcggcggtaaagcccgcgttggcataagcgcagatatcgcccagcacagccccagcctcaacgctggccagttgatcacgatcgccgagaaagatcactcgcgcatgatcgggcaaggcgtcgatcagtctgctcatcataggcagatcgatcatactcgcttcatctaccaccagcacatcaagatgcagcgggttaccggcatgatgacgtaaacgctggctacccggctgcgcgcccagcaatcggtgcaaagtgctggcatcttccggaatgcgtttcttttgttcatcggtcagcggtaactgtcgcaaagccttgccgagagattcggttaagcgcgcggcagctttacccgttggtgcagccagacggatacggcagcgttcgccgtcggccatttgaattaacgctgccagcaacttcgctacggtggtcgttttaccggtgccagggccgccggaaatcacgctgatccgccgcgtcagcgccactgccgccgcaactttttgccagttaatttcatcgcttactggaaaaagtttgtccagggtttgcgccagtagagcttcatcaacctcaatggcatgattcacttcgttgaaaaagcgtgccactgtgcgctcgttacaccacatgcgattcaaataaagacgatcgccacagaggatcatcggcgtgggttcatctcccctgctgaccgcttgagaagccagcaagcattcttcccaattttgtagctcaccgatttcactgacacaggtcgccaacagcggatggctcgcctcgttattttccagtcgactaagcggcaaacaaacgtgtccctctccggcatcatgacttaacagtgccgccgcgagggtgacggcaggatgttcatctcccgccacggtcagggcaaattgcacatccagcgggcgtagctgtttgtgctccacagcttccagtaattgcttttgcaatttcattacgcctcctccagggtcataccggcaaacatctcatccatcagggcaatcaacccggcgttgggtcgggttgtgtaaatcccctgttgcggatgttctttatcaacgccacgcaggaacagataaataacgccgccaaagtggtgctcatagtcgtaatcagcaatgcgatggcgcagataacgatgcagcgccagggtataaagctgatattgcagatcatagcggtgtgcctgcattgccgctgccatagcctgttgggtgtaagcgctactgtcttcacccaaccagttggatttatagtcgagcaggtaataacgcccttcgtggcggaacaccaggtcgataaagccttttaacatgccacgtacctgcatgaactccagcggcgggcagcctgcggatagcgggtcaaactggcggattaacgtatcaagctgactggcgataagcggttcactaatcggcagataaaactccatctccacctgtttattgcgggcggaaagttgactcaggcttacgccggtttcattgagaggtgcctggaggacagccgtgatccactcggtcaataccggttcccactggctttcaaagccgccgagttccagtttttcccgcacccagttcgggtcaaccggctgggtaaaatccaggtcttcaaacaaactgtgcaagaacgtccccggactcgcaccgcgcggaaactgatgtggtgttaacgtcggttcttcaacgacgctggcaacgcctgcagcatcgacatccagccgaggcatcaaatcctgggcgataccgtgaccacgctgttgcaaaccagagtagctggtgacgcgccagttatcgccgggcaatcgttgtaacgtcttcgcattcagctctgctgtagaaacatcattaacctgccagggttggttatcaccagtttgtgccgtttgccaggcaatatcatcatcgcataacgcttcaatacaggtgcgaagccctgccgcatcttgcggttcccctttttgcagcaaacgcccgagcgcactttggtggacgtcggtgtcaccttttttatcgccacgacggcgcaccagcggtgcaacgccgagactgcaatgccaaacgctacgtgtcagcgccacgtaaagcaaacgcagatcttccgccagacgttcggcctccgcgaggtcgacgctttctggcgcagcattaagatccagaactgcctcaaagctgtggcgatcgtgataaaacgcctgctcctggacgcggaaattggtgataaacggcagccagaccaatggatattccagccctttgcttttgtggatcgtgacaatctgcaccagatgtttatcactttcgagacgcatttgttggctggaggcattactgtctggctcgaggatatgttggcttaaccagcgtaccagcgcatgttcactttccagctgcgttccggcttcttgtagcagttcgctgatatgcaagatatcggtaagacgccgctcaccgcctgccgttgccagcaagttttcagcaatgttacgcgcgctcatcagcgcccgcagcatcggcataacgccacgtttgcgccagatttgccgataaccatcgaactcttcgactaccacatcccacgcatgttcgtcattgttcagcgtttcgatatccagcgcgttcagccccatcatactcgttgccagcgcactacgcagggtgttctcacgttcgggcgtcatcaccgcctgcaacaaccaaagcatttcctgcgcttccagagtttcaaaaacactgtcgcggttgctaaggtaaacggaagggatttccagcaacgttaaggcatcgcgcacctgggcggcctcctggcggctgcgcaccagcacactgatgtcgctagcacgcaccggacgcgcgtcgtcgccgttcatcagcaacgcttcgccccgctgtccggcttgtagccagtcgcggatttgcgcagcacatacctgcgccatggtactttgataatcgccaacgccgcagctttcgccttccatcagccacattttcatcgcaggctgtgtttcacctttaaatacaaaacgtaacgcctgatttttcccggcacttttcactggaataaacggtatttcgcgaaacatgaacgcgtcatcagtctggctgaaaagcttattcacgctgttcaccattcctggtgcggaacgccagttggtgtctaaagtgtagtgggcgtgaacttcgctacgcgccttcatataagtgaagatatccgcaccccggaatgcatatatggcctgcttcgggtcgccaattagcaacaatgcggtttccggctgatggtgccagatacggcgaaaaattcggtactgctgggggtcggtatcctgaaattcatcgatcattgccaccgggaatcgcgtacggatcgccgctgccaacacctcaccgctttcgctacgcagcgcggaatcgagccgacttaacatgtcatcaaaacccaattcgccacggcggcgtttttcacgcgctactgtttcgcggatctcagccaatgcgcgggtgatcaccagatcgcggatgctcaatggttctgcaagcagttgatcgatcgcctcaaacagtggatgtcgcggggtttcccccccggccttcgtgcgatcttctaagaaacgctgggagaatttttccaggctctccggcaactgataactgtttgtctcttcttctgcccaggcgctgatcttgtcgatccatttagcctgattgctacggttaaacttgcgtcgatcaataccagaagattcgatcagcgcatccagttcacccactgcgtcgcgccactgctgttttaccgtatcaatacgcgccacaatttgcgcgtgacgggaagccagcgtttcatcatcgggcggcggtgctttgataaccggcgcttcgccttgcagataacgattaatatcgcgcagcaacgcctgcggccctttccaggtttcaaagacgacctgggctatttcacgcggcagcgggtagcagtggcgacgccagaaatcggcgcaggcctggtagcgtagcagagactcatcttcaatcagctgctgctcaaacagcatgccggattcaaaggcattcaggttgagcatgcgctggcaaaagccgtgaatagtaaagactgccgcttcatccatctgccgttcggctaacaacaaccactgcgcggcttgcgctttatcgtcgatctcttccagcaggcgttcgtacagtggattgtcggtggtttcacgcagacaggcgatgcgcaactcgtggatattgctacggatacgaccgcgcaattctgccgtggcagcctcggtaaaggtgaccaccagcagttcttcaacggtcagcgggcggggaaaggcggcggaaccgcctagtccaagtaacaggcgcaaatagagcgccgcaatcgtaaaggttttgcctgtgccggcagaggcttcaatcaggcgctcaccctgtaagggcaagcgcaaaggatctagtgtctcggcgacatcactcattcttttcactcatcaggggcattgtttgctgcaacgcgctgacgttctcccacactttccagccttcagggtgtacatattcggctttcccgttctggctgccggaaatctggctcagaatagccatgccttgcggctcgaccaccgcctgatggaagaaatcagcaagtttttgcggcgtcagcagttttatctgggccacgattttatcacggctatcgaagcgcatattgccgcgatcgaaatctttacttaacttgcttgcttcttcgccgagcgtttgcggtgcctgcagcatctgggtaattaccgcctgctggatttgcgcaaactcatctggcttcatcgctcgcaattttgcctctgcggttgggaaaaacgccttgtaacgctcccacaagaaactaggctgtttatcattgctttgcaaaaggaagcccatgccccactgacgccccacgctcattggaaacgcaaacacggcatagcccaattgttcttcggtacgcaactgattgtagaaccacggctgtacgatctgccccaacagagagctataggcactgctggtgtattcatcgtagccagtcggtacaaataccgctgccagtgcggagtcggtgctgttaccggctttttcaaagatgacggattgttttttatcgaccactacatctttgtttcgacaccactcactaccatcagcgcccaactgtttttgcacatcgcgtgccagcgttgttgcctgggcctcggtcatgttgccgataaccataaactctggtcgagccccactttttaaggcgtcgcgataggccagcacctctttcaacgtaatggagggcaaaattttacgccgttcatctcggctgaagtacggcacttggctgagcatctgcgcgggcataatcgcctgctcaaacgctttacccttttctgcggaatccatcatctggttataccaggacttcgcctgctcaagctgatcttccgtagcggtatagctaaagtacccctcgagcaatgcctggaacagctgcggcagacgctgggtgtaaccattagcattaaccataaggccgttgttagcgttggtggaaaaacttatgccaccaacgctcgcctggttgcttaactgatcaagcgccagccctgcgagataatcattgagcgcaaacatcacctgattgcgggcgctgtccatggctttcggattacgcaaaatcaggctgacatcagctttgggctcgctggcaaaataacggcttggcgcatacaccacgcgcagattgctctcatcaacaatcagctctggatggtcgtatttcttctcactcttaatcaggctgaaatcatcaggaatataagggttaagctctggcaaagagagcgcaatgtcggcggcttttttctgccagtcggcgaaagtttgtgcgctgattttatcgacctgatacggcgcatcgacaaagtaagccgttttgttgtgcggctctttcgggctgatataccagatacgcgcattctgcggcgtcatcatcgccagacgttcctttactgctttagcatcgtaccgatcggcaatattgactgcatccagcgtatgctcaacaggaacgcgaatcatggtatctgccagccattcgacgtaatccatatcacgggtgatgctcggataacggaagtcgatatccagcacattcgccagttcatcgaagtattgtttatcaatgcctttttcacgtaacagattgagatagctaaaaattgccgccacaacctgatcgcgattagccaggcctttatcggttaaagacgcagagatcgctaatacgccgctgttgccgttgacgataggatcggagttggcgctaatgccctcaactaatccctgcttttgcagccagtcagaaagtgtacctgggctgcgattgccaatcagataggtaatcaattcatcggttttactacggaacttcgcactgttgttatcgatgcgaaactcaacgcgcaacactttacgcggcagcgcagggacgtaatgaatgataatgcccttttgcgcgtcggtgactaccggcacggtgatttccggttttttgctctctttgttcggcacgcgaccaaaggtgtccgccgccatttttgccaactccggcagcggtttattactgtaaataaccgccttcatcaaattggcggaatagtacttctcgtggaaatctttcagcgcctgctgcaccggattaccaggtttgtcgcttaaagtttcgaggttaccaccagaaaacttactaccggggtgtgccgggttaatggtttctgcgctgacctgtgccatgcgcatcccgtcacgcgtacgcgccatggttaattcagcgttcaccgcattacgctcacgttcggcatatttcttgtcgagcaaaggttcagcaatagcatcggccaggcggtctaccgcaccaggcaaggcgtcgttctcaacttccagatagaaagccgtgcgatacggcgcagtgctggcattgtgactaccgccgtgcattttgagatattcggccagactgtcagcctgcgggtactttttgctccccatcagactcatatgttcaaggtaatgtgccagcccctggtacgcctcgggatcttccaggctcccaacgggcaccaccagcgcgctgaggcttttaactgcctgcggatcagaaaccagcaagaccaccataccgttatccagacgtatagcctgatactggcggttatctttatcacttttacggatggtttcctgaatcggctgccatcccgtttctgcctgacttaagggtgcccaaagggcaactaacaacaataatgctttgaaccaggtgctgcggggcattcacggacctcataatcaacttaattttctgtccagattcaacacgttaacgcaaatcatctgccagaatttaatcttgtgctgcacgagtcagcctatgtttatataaccatcagtccgtgactggtgcgcatcataaagtaagcggatagattgcgcaatttttatacagcactcaactctgattaaagcgaaacagcggtaacaggaaacgttggctctgttcaacgatggcctccattgtctctggtgttaattgccgccagagcctttgataccagatatcatcaccttcgccacgcaccatcatgttgccttcgtaagcctgaaggaatttcgtacgggctttttgcaacgtggaatcgtcatccagcatggcatcgttttgcgcgtcataacaggtttttagccacgcgccgccactttcaggtaacaccagcaatggcgcggacattccttcacgatacccctcaatcagttgactgaggtaatgcaaagcctgttcggctgcaagcggcggaaaacgccactcgccgtctttgcgtagaaaaaggcgactttcaccattaccaccgctggcacagtagacaaggtgttccagccaaagttgcattccctgggccacacttaataaagagggacgccagcgcaacaggccatccggctgcacctgcggcaaccagccagttatctgcacaccgttgcaggcgagatcaatttccatactctgccccggctggcgacaggcaatgactctgtcggcaagctgctgcatctcctggcactgtgtttcccagaaaatttcaccaaaagcgccatacggtaaatcccctgccgctcggaagcggcggaacaagcgttcggcatcatcctgctcaaccagtgcattcaataactgctgattgatttgataacggctaagtccttccagaataaatggctcggtgtcggggatttcgctgtcttcagtacggaagttcacctgcaaacgcatctggaaaaatgcccgcaccggatgtgcccagaatcgttgtagcgtttccagcggcacggtttccggtaaggtaaacggcagcggctgaacaaattcagaatgtgctttaccagcctggctggccgcaggtagccattcacgagcatagctttgtcgttcgcctggctggtagttttgtggatcaaacggcatccgggtatggaggcaagtaagatgcgcttttacccttgcctcgctttcatcacagttgagcgcttcatcgcccggtagataatgactttgcccgatgtagtcgatcagttcctgcaccagtacgctcgggaaacgctcactgttatcctgaatggaacgaccgatatagctgatatagagtttttgctgcgcggaaattaacgcttccaggaacagatagcggtcgtcatcgcgacggctacggtcgccacgcttcggtttctggctcatcaggtcaaagcccaatggcgcaagctgacgtggataaacgccgtcgttcattcccagcaggcaaaccactttgaacggaatactacgcattggcatcagagtacaaatgttaaccggtccggcgagaaaacgctggctgatacgttcttgatccagacgctgtgccagttcatcacgcaatagactcagcggcaccgcgtcgccatactgcgcacctaaaccttcggcgataatcgcctgccattgttgttcgatcagcgtcatcgccgcttcggtttccgcatccggcaggaagaaggcgttgagcatatcgcgacaaaccggcaaccactcttccagcggacgctcctgtgccagcccgcgacgccagatgtttagctgcattagcagactagccagatgccccaccagttctgcaattaagccgctgctttcatcataaggtagaacgctttgccactcgccctgcgcgctctccatcgcgtagcccaacaacatacgcgtcaggccaaatcgccaggtgtgttgtccggtggcggggagttccagctcgcgaacgttgtcgtcatctatgccccaacgaatgccggattcgttgacccactggcgtaaataacgcagcccttcttcggtgatgtcaaaccgcgccgccagcaccggcacatccagcaacgccagcacatcctcactcacaaaacgactgtcaggcagacttaacaggctgataaacgcttccagtaccggatgactctgccgcgcacgacggtcggaaatggcgtaaggtaggtaacgatccgcaggtgcgctaccaaacacagcctgaataaacggactgtagctgtcgatatcagccaccatcacgatgatgtcgcgcggagtaagtgtcgggtcttcctccagcatcgccagcaggcgatcgtgtaaaacttcaacttcacgctgcgggctatggcaaacgtggaaggtgatactgctatccagtggatcaagcgggcgtttgttatcgctacgggaaaactcttcgatgttcacaccagcaacggcgcggttttccagttccagaatgtcagactgaatgttatgcagcaggttatctggcgtgacatcgacaaaggcgtccagctcctggctgctctccaggtcagaaaggagataaatgtagtcgcgcccaagcttaccccaactagccagcagcgggttgccgacatcctgttcaccatcgctgttaaagagctgcccggcattttcgctatcacgaaatagcggcaattcgcgatcttcaaaactgtgtcgacgctgacgggtcagcagtttcgccagataagcaggatctttaatatcgccccagtaataacggcaggggttggtaaacaggagatggatttcaatatgtttacccagcgcctgtagcgcctggagataaacaggcggtaacgcggaaataccgcatataaagacgcggctaggtaaccccggcgggcaggtcgtcgcggactccagcgtttcgataaagcgctgatagagattggcgcggtgccagcgcggttgcccgagttgatgggtatattccaccagcgccttccacaacggggcttgccaggcctgtgcttctcccagcccttcaaccaaatgtcctgtttcccactgtgccagccagtccggacgatagaccagatactggtcaaacaggtccgccgctttactggaaagctggaacagttttcgcttgtcgctatcgtcagtcagataatgccgcaacagggtaaagtcttcgcgctccagcaattgcggcagcagagtcatcagtttccagctcatgctctgtttgttaaaggcgctctctttggggatttccggtaacacccggacgaacatatcccagataaagctcgctggcagcggaaaatcaatgtttgccgcaataccaaacttttggctcagggtcatttgcagccactgtgccataccggtactttgcaccagaatcatctctggttcgaaaggatcgtccagccgttcgcgttcgacaataaactccatcaacgcttccagcacgtccagacgattggaatggtagacccttaacatagcggctcctgattactgacgattcgggcaatgcaggcgggtcatctcgccttctctgcccccgggactaactagcgtaacgctgatgctgacacatcccgcctggcttgtctgcattcggttgacctgccagttggcaggtgggctaatcgcgcgcagttgcgtttgctgccagccatgccgccagagctgttggtactggtttctgctggcaagactgttcattaatgttcgctggaaaccgcttaacgcagtgacaatcatcaccatcaacaccatcgccaacattacctccggcaggctaaagccttgttgattcttcagggaagcactcataacgccctctctttcagcggttaaatcagggaagctgacataacgccctctctttcagcggacaaaaatcgctccagccgcgtgggctaaaaacaatgtttccatcaatgacttcgcctgttcgccacaagctaacgccttcataaccggcaatcaataaggcttcattatctgccagtaaacgcaaacaaacctgggcatcggtttcagcgtactggctgcactgaactgctggctgcgtctgccagcagtgcatttttccccacgccagcgcgctctgaacgatggcctggcggcgcaaactctgactttccatgctcacgcgagaggcaaaactgcgatcctgttggctcattccttgtaatagcaaactacccaaaaccagcagcatcaggaccagagccagactgctaacacccttttcgcggttcacaggttgaatcctgtcacgctatagctggcattcaccacggtttgcggttcagacttactggcagcacgcatattaaccgtcaacaccgggctgaagccgctgacatcctgacgtacgacctgaaaagtgtcgataatgatggcatccggattagtgactttatcccagcccttaccttcacaggatgtcgcaccgcgtagcgtttccagcacatgctccttcagacgaaatccaatctggtcggactcttttaccggttcgcgatcccagataccgttactgttcgcatcccactgcacaatgacacagtcaccctgtccgacaatttccagcccttcgccggtacagatgccatgacaataacccgccctctggagatgcttcgcgacggtaaatacccgcagccagatttcatcttccagcgccagcttacgggtgctcgttaaactttcacgctgtaacgcaggcagaaagcgtgccgcccccagcaacaatacgctactgatcgccatagcaatcaacacttccagcagagaaaaaccttgctcttttacaggcatccttctgtttctccttgctgacaaagccggagtcttccccacgggctaaccaccagccaccactcgcccgtactgtttttgaagcgaatatgcccggcccatgcggtattgcgcaggccaaagaaagcaaggctaggtgtcaggtcgctcatttcgacttcgggccagcgtggcacaaagaccaatggactactgccatgacaggtattggccccagcagcggaactcacaaggcaccataacgtcccctccctgataacgctgatactgtggtcgcggttatgccagttggcatcttcacgtaaatagagcaaatagtcccgcgcctggctggcggtttgccatagccgttggctctgctgccagtattgccagccatagagtccacttgcgcttagcatgaccaaaatcagcatcgcgaccagcgtttcaatcagcgtataaccacgttgtgttttcatgccggcagtatggagcgaggagaaaaaaagacgagggccagtttctatttcttcggcgcatcttccggactatttacgccgttgcaggacgttgcaaaatttcgggaaggcgtctcgaagaatttaacggagggtaaaaaaaccgacgcacactggcgtcggctctggcaggatgtttcgtaattagatagccaccggcgctttaatgcccggatgcggatcgtagccttcaatctcaaagtcttcgaaacggtagtcgaagatggattcgggtttacgtttgataatcaacttcggcagcggacgcggttcgcggcttaattgcagatgagtttgatccatatggttgctgtacagatgcgtgtcgccaccggtccagacaaaatcacccacttccagatcgcactgctgcgccatcatatgcaccaataacgcgtagctggcaatgttgaacggcaggccgaggaagacgtcacaggagcgctgataaagctggcaagagagtttgccgtctgccacatagaactggaagaatgcatggcacggtgccagcgccattttatccagttcgcctacgttccacgcactaacaataatgcggcggctatccgggtcgtttttcagctggttcagtaccgtagtgatctggtcaatatgacgaccatctggcgttggccaggcgcgccactgtttaccatacactggcccgaggtcgccgttttcatcggcccattcgtcccagatggtgacattgttttcgtgtagataagcaatgttagtgtcgccctgcagaaaccacagcagttcatggatgatggaacgcaggtggcaacgtttagttgtcaccagcgggaatccatcttgcaggttaaaacgcatctgatgaccaaaaatggaaagcgttccggttccggtacggtcgtttttctgtgtgccttcgtcgagcactttttgcatcagttctaaatactgtttcatggttcctcaggaaacgtgttgctgtgggctgcgacgatatgcccagaccatcatgatcacacccgcgacaatcatcgggatggaaagaatttgccccatgctgatgtactgcacccaggcaccggtaaactgcgcgtcgggctggcggaaaaactcaacaatgatgcgaaacgcgccgtaaccaatcaggaacaaaccactgacagctcccattgggcgtggtttacgaatatacaggttgaggataataaacagcaccacaccttccagcagcagctcgtaaagctgacttgggtggcgcggcagcacaccgtaagtgtcgaaaatggattgccactgcgggttggtttgcagcagcaaaatatcttctgtacgggagccagggaacagcatggcaaacgggaagttcgggtcaacgcggccccacaattcaccgttaataaagttgcccagacgcccggcaccaagaccaaacggaatgagtggtgcgataaaatcagagacctggaagaaggaacgtttagtacggcgggcgaagataatcatcaccacgataacgccaatcaggccgccgtggaaagacatgccgccgtcccagacacggaacagatacagcggatcggccataaactgcgggaaattgtagaacagaacataaccaatacgtcccccgaggaagacgccgaggaagcccgcatagagtaagttttcaacttcatttttggtccagccgctgcccggacgattcgcccgtcgtgttgccagccacattgcaaaaatgaaacccaccagatacatcaggccgtaccagtgaagcgccacgggtcctatactgaaaatgaccggatcaaactccggaaaatgcagatagctactggtcatctgtcaccacaagttcttgttatttcgctgaaagagaacagcgattgaaatgcgcgccgcaggtttcaggcgctccaaaggtgcgaataatagcacaaggggacctggctggttgccggataccgttaaaagatatgtatatgatccgcgttataaccctccgcgaatcagcccgcccatgccgcgacgctccataaaggctgcaacctgatggcgaacttcggtcgccagttgcgcttccagactacgctgcgcaagattttctgcttcggcataatcaatgcgccgcagcaggtattttgcccgcgctacagaacgtccgttcatagacagatggcgatacccaagcccaatgaggattgccacgcacatgggatcgcccgccatttcaccgcacaaacggagatcgattccatgtatttccgcttcccgggcgatcatcgccagagctcgtaacattgcaggatgaagactgtcataaatgttcgccacccgggtattgttgcgatcaacggccagaatgtattgagtcagatcgttggtgccaacagagatgaaatcgacccgctttgccagatgcggcagcataaataccatactcggcacttccagcatgatgccgatacgtggtttgggaatttcgtaaccgatcatctcctcgacttcacgtccggcacgttcaatcaggcggcgtgcttcatcaacttcatcgaggcttgtgaccatcggcaacagaatattcaggttgcccgtagcggcattagcacgcagcatcgcccgcacctggatcaagaagatctccggctgatcgagcgtaatgcgaatcccacgccaacccaggcatggattctcttcgctgatcggcatgtaaggcagctgcttatctgctccgacatccagcgtacgcaaggtgacgggtttatcattgaacatttgcagcatcccctgatactgcgccacctgttcttcttcgctcgggaaaccactttgcagcatgaatgggatttcagtgcgataaagaccgatgccatcaatacggctgcccagtttttcttcatgttccgggcttaaaccagcattgagcatgacttttatacgctcaccgctttttaactgcgcgggtaaattgacgtcatcttccgccagacggctaagctcaatctcttcactaattagccgctgatattcttgcagcagtaccggctccggatcgaccagcaattcaccgcgatagccatcaacgatcagcgtcctacgatgcagcacgctaggctgaatatccgcgcccatcacggtagggatccccagcgcacgtaccatgatcgcagcatgggagttggctgcgccatctcgcacgacaacaccgactaagcgatcctggggcagctcagcaagcgttgtcgcactcagttcatctgccaccagaatgaaacgttccggccaggcgttcggcccttgattagcgtcatcaagatgaaacagcaatcgctgacccagcgcacgtaaatcgccagcccgctctttgagatagttatcacttagcgcggcaaactgttcggcaaatttttcaatgaccgtttttaccgcccactctgccacgctgcctttatcaacctcggcaaacaattcgcgacgcagccgggtgtcgctaagcaggtggctgtaaagatcgaaaatagccgccgtttctttttgtgcaccggcggcaaagcgtttgctgtagcggcgaaactcgtttgccgcttcttccagcgccccggtcagtcgttcgcgttccagagccggatccagcgtacttgcctgatacacctgttccattaaaggtaacgtggcatcctgccagccttcggcaatcgccacaccaggtgctgccggtaatgcgcggattcgcgtctggcgatattgcccaaacaaggcagtcaactggctctgagaaagaatagctgccatctgggtggcaagcgtcaccaggaaggattcttcactttcgtcatactggcgcaactctcgttgctgtaccaccagtacaccaagcaactggcgacgttgaataattggtacgcctaaaaacgcgcggaaacgttcttcttttacggaggggatgtatttgaagctggggtgcttttgcgcatctgcaaggtttatcggttccgccagcctgccaaccaggccgacgatcccttcatcaaacgcgagcgttacagtgcgaccgcgtggttttttcagcccccgggtcgccatcaggtagtaacaacgtcgatcatgatcggccaggtagacgctacagacctcggtatccatcgcaagacagatgtcggtaaccagaatatttaacgcctcattcaggcgtggtgcgctggctaccttttcgactatttcgcgcaggcgagtgagcataattggcgtgacttaacctcttttacgtcgataagcagatgcgttttgtggttttggcgtattttcctgcagactcatcaccacactcgcgaactctttcattaccctacggtagacatcacgtttaaaactcaccacctgtctgaccggataccagtaacttacccatcgccagccgtcaaactctggtgtactgctggtttgcatattgatttctgcatcgccgctcaccagctgcaagagaaaccatttttgtttttggccgatacaaaccggcttcgtgtcccaacgcaccaaacgtttcggtaatttgtagcgcaaccagttacgcgtactagcaaggattcgaacgtctttgcggcttaatcctacttcttcaaacaattcacggtacatcgcctgctctgcggattctccggggttgattccgccttgcggaaattgccaggagtgctgaccaaatcgccgggcccacattacctgcccctggcgattacaaatcacgatacctacgtttgggcggtagccatcgtcatcaatcaccggactacctcaaaataaagctttatatacgaatgattgtttcatactccaggaagacggtaaaccactctctgcagggcattacacactaataacaattgaataactcacagttatgtgcagagttataaacagaggaaggggtggatagccgtttttattcaccttttctgtggatagagttgtgaagaactacggaattactacgggaaaacccggagcattctgaataagcccgatatagacattttaaaatattcattatcagtcaatgcattacatgtaattttagtaatgaaaaagagtaattcgtgacccaggtcacacctctcatttacgggttggcgaaagatcaaccaatgccgtatttatccacagaatgtgccactaagttaagcactgaaccactaaaaactggagtttcgtcgcacgtcaaggctgtaaatggaaacagtagtggaggtttttcacagttatcccagctttctgtggataacatggtgtaagatcctgtttattttcagtgaccagatttggaaaacccgttgcagtgttgcgcaactcgattaccggcaacctaaaaagcaatataaatcagagaattgaacaacgcatgtggaaaaagttacactgcgaatattcggcacataattgctgtttgttttttaatcaaggtatcatgacatgtcccaacctcgcccactgctctctcctcccgaaactgaagaacagttgttagcgcaagcacagcaactttctggttatacattgggagaactggcggcacttgtcgggctggttacgccagagaatttaaaacgcgataaaggctggattggcgtgttactggagatctggctaggtgccagcgcagggagtaaacctgagcaagattttgctgctctgggcgtggaacttaaaactatccctgtggatagtcttggtcgtccgctggaaacaacattcgtttgtgttgccccgttaacgggcaatagcggggtgacctgggaaaccagccacgtgcgccacaaactcaaacgcgtactgtggataccggttgaaggcgagcgcagcatcccgctggcgcagcgtcgcgttggaagtccgttgctgtggagcccgaatgaagaggaagaccggcagctacgcgaagactgggaagaattaatggatatgattgttctcggtcaggttgagcggattaccgctcgtcacggggagtatttacagatacgaccgaaagcagcgaatgcgaaagcgcttaccgaagccattggtgcccggggcgaacggattctgacgctgccacgcggcttttatttgaagaagaatttcaccagtgcactactggcccgtcattttctgatccagtaaccatcgctttgacctgccgctttccgggcatataattaccgcttcatttttttggcagggctttttagatgttatttgcatggataaccgatcctaacgcctggcttgcgctcggtacgctgacgctgctggagatcgttcttgggatcgacaatattattttcctttctctggtggtggcaaagcttcccacagcacaacgtgctcatgcgcgccgtctggggttggcgggagccatggttatgcgtctggcgctgctggcaagtatcgcctgggttacgcgcctgacaaatccgctttttacaatattcagtcaggaaatttctgcccgtgatttgattctgcttctgggtggcttgttccttatctggaaagccagcaaggaaatccacgaatccattgaaggtgaagaagaagggctgaaaacacgcgttagtagtttcctcggcgctatcgtgcagattatgctgctggatattatctttagcctcgacagcgtgattacggctgtgggtctgagtgatcacctgtttattatgatggcagccgtggtgattgccgtaggcgtgatgatgttcgccgcgcgcagcattggtgattttgtcgaacgccatcctagcgtaaaaatgctggcgctctctttcctgattctggtgggctttaccctgattctggaaagtttcgacatccacgtaccgaaaggttacatctacttcgcgatgttcttctctattgcggttgaaagcctcaacttgattcgcaacaaaaagaatccgctctgatactccgtacgctctcctgcgggagggcgtactcactccttttaccctcacagtttaagattttcctgctttcaagatatataacgtcggtttataaacagactattatcataggtaggccaaatgaggataaccggatgaaaaaatgggcagtaataatttctgcagtcggactggcgtttgctgtttccgggtgttccagtgattacgtcatggcgaccaaagatggccgtatgattttgaccgatggaaaacctgaaattgatgatgataccgggctggtgagttatcacgatcagcaaggtaacgcgatgcaaattaaccgtgatgatgttagccaaattattgaacgttaacaaataaggtcagcatccggctggccttaagatttttctctttcccttttcccttccctctgccatttttatattccttatgtcgtgattataaaaaggaaacggctatgcaatatcaccgtataccccacagtagcctggaagtcagcacgctggggcttggcacgatgacgtttggtgaacagaacagcgaagccgacgcccacgcacaactcgactatgccgtcgctcagggcattaaccttatcgacgttgccgaaatgtacccagtacctccgcgccccgaaacgcaagggttaaccgaaacctacgtcggcaactggctggcgaaacatggcagccgcgaaaagttaattatcgcctccaaagtgagcggaccgagccgcaataatgacaagggcatccgcccggatcaggcgctggatcggaagaatatccgcgaagcgctgcatgacagcctcaagcgcctacagactgattacctcgatctttatcaggtgcactggccgcagcgcccgaccaactgcttcggcaaactcggttatagctggacggattctgcgcctgcggttagcctgctggatacgctggacgcactggcagagtaccaacgcgcgggaaaaattcgttatatcggcgtgagcaacgaaactgcatttggcgtaatgcgctacctgcatctggcggacaaacacgatctgccgcgtattgtcaccattcagaacccttacagtctgttaaaccgcagttttgaagtaggtctggcagaagtcagccagtatgaaggggtcgaactgctggcctatagctgcctgggtttcggcacgctgaccgggaaatatctcaatggtgcaaaacccgctggcgcacgtaatacgctctttagtcggttcacccgctatagcggtgagcaaacgcaaaaagccgtcgcggcgtatgttgatatcgccagacgtcatggcctggaccctgctcagatggcgctcgcgtttgtacgccgtcaaccgtttgttgccagcactctgctgggcgcaaccacgatggatcagctgaaaactaacatcgaaagtttgcatctggagttaagcgaagacgtattagctgaaattgaagcggtgcatcaggtttatacttatccggcaccataagattaacgccggttaaaaccggcgttaaatattaatgacggcgctgccagatccacagcgccgttattgccagcgcaaacagcgcaccgaagccaatgccaatgggcacgaccgggatgcctatcattaccgccaggctgtaaatgcccagcatcaacaacatggcgctgttttcgccaaggttttgtactgcaatcgcattccccgccccgacgctttttttaccccgctcctgtagcaacgcattgagcggaacgacaaaaaagccccccatcacgccaatcagcatcaacaaggcataggctggcagcagctcgtgttgcagggaaaaaatcagtaccaccacgccaatcaaaatcccggctggcatacagcgactcacggtttccagcgtaactaacttcgctgccgcacctgcgccaaccacgataccaatcgctaccatcgcgttgagataggtgggcgtagcgttatcggtaatgcccagcgccaccggtacccacagcaccaacaggaaacgcagcgtgacacccgctccccagaataaactggtgcccaccaggctaaaacgcgtttcaccattgcgccataggctggtgcaggcattcaggaaactgcgggtcatgttgatgagattccaggactgccccggacgcgccgccgccagtttgggaatgtagatattggcaacgaccgcaccaccgtaggccagtgcgcatgcggccagggcgacgaggacatgccagtcagccagcacaccaccggctacggaaccgagcaaaatcgccgctatggtagaagcttccattaaaccgttagctttcactaacttactacccgtggttaattcgccgagaataccgtatttcgccggactataggctgcagcaccaacacccaccagcgtatagccgagaaacggattgataccaaagcagatactggctgcgcccagcagcttcaggccgttggcaaacatcatcacccggcctttggcgaagctatccgccacctgcccgacaaacggcgcaaaaagaatgtaagcacctacaaacaccatttgcaggatgggctggctccactccggatagaactgcgctttcagtaacgccagagtggcaaacagtagggcattatcgccaaacgcagagagaaactgcgccacgataaccgctttcatccccttgctccacaagctagtgttagtgtgcacactctcactcatcgtgttgttccgcttcgtctacccagcttttcaacgtgacaaagtcaggtttgccgctgccaagtaatggcatctgtttcagatagcgaatatcgcgcggtacagcaagctccggcacgccgtgctcgcgggcatactgttgcaacttatcgcgcgtcagttcgttatctgtggtgaaaagcaccagtgcctcgcctttgctggcatcgctcttaatcgcagtggcatggactttatctgggctaacaccaagtgccagttgttccaccatttccaggctcaccatttcgcctgcaattttggcaaagcgttttgcgcggccctgaatctgcacaaagccctgctcgtcaaaacgcacaatatcgccagtgtcataccagccgcgctccatttcgccgcgaacattctcggcggtgggcacttccagtacacctggcttctccacccgcagatagccgttcattatgttcggccctttcagttgcaggcgtccgccctcttcgataccagggacgctcaacaggcgcgcatccattcctggtagaatacgccctaccgtaccgggtttcgccgccatcggtacgttgatagaaacgacaggcgcgcattcggtcacgccgtagccttcaaggatgcgcaggccaaatttatcctgccaaagctgtttggtactttcttgtaatttttctgcgcctgccaccacatagcgtagacgatagaagtcatacgggttggcgaaacgcgcgtagtgaccgaggaaagtgctggtgccgaacaacacggtgcaactgcggtcatacaccaactccggcacaatgcggtaatgcagcgggcttggataaaggaacacttctgcacctgtaagcagtggcgtaaacaggcctaccgtcagcccaaaggagtgaaacagcggtaacgcgctcataaagcgatcgttggtggtgaagtcggcaatcgttttaatctgctcgacattcgccagaatgcttttatggctatggacgacgcctttcggatggccttcagaaccggaggtaaaaaggatcagcgcctcttcttccggctgctgtttaacctgtgccagacgcggcatcagcaaatgagcgaagatccatactttgtcggcagtggtgacatctgcttttaaatcttccagatagacccagcgcacctgagtaagttgctccggcagatgccagagtttgcctttatcgagaaactggcgggaagtgaagatggttttgatttcagccgccgtaatagcactggtcagcccttttaccccggcagtgtagttcatcattgcgggcatgcggcgacgggcgatggccccaaaaatcactgccgcactgatgcctgcattgggcagcattaagccgatgcgttcgccttcaacactgtatttttcaaggatgcgtccaacaaacagcgttttcgtaagcaatttgcgataggagtctggggtaaagttgacgtcttcgacacatttcttcccggctccgaagcggtacattgcactcagtaaagattcgtacagcgtttcacgcgggcgcaccgccattcgcgcttccatcattatttgatgcagcatttcgccagcgattttgcgacggtcacgggcacgcggcgcatccggcatcgccacctgcgttggtggcaaaatatgcagagtaatttgcgggaacaagcgacgtttaaccagacctttcaggcggctgaagtgcgtaagttccgccccttcaatacgcacaggaataaccgttgcaccagacttcgccgcgacaaaacccgcgccatcgtagattttcatcaggctgcctgtcgtggtgatgcgtccttcagggaaaatcaccactggtcggccctgttccaccagacgtaccagatgtttaatagccataggttgcgtcgggtcgagaggaacaaagtcgataaaacttttcagccaacgcatataccactgttggcttatactggtgtaaacggcaaacactggacgcacaggtaaaaacagtccaagcaaaatgccatcaataaaagagacgtgattaggcgtaattagaacgcgctcgcccttcagtgcctgggtgtcacccgtaacgcgaacgcgatacaaaacacggcacaaatttcgaaaaaagctaaaaagcattccaactccctttgctctgattcagtaaaagcgaatggagggagattacacgagataaagaacgcgagcgacagtaaattaggtgcgaaaaaaaacctgcgcatccgcgcaggttggtgcaagagacagggtacgaagagcgtaccgaataatctcaccaatcaatacctctgggatcttgattgtggtctgcacgacgactcttcgccagcgagaaaacgcaaaggaatgaagggaaatgcaacgaggtgtgtaaattgtcggttactgttacagattgatgaccggcaaaaaaaacctgcgcatctgcgcaggctggtgtaattcatgtgctcaacccgaagttgacttcacctatcaatacctctgggatcaccactttagcaacctgaagccaaacgccaccagcggtcaatcgcaacagcgtttcgcaaagtgtaaccaaaggtttgcaatctctttttttgtcttacttatttgcgtttggctcacattcccacgatgaaaacacgccaccccttgaaccaacgggcgttttccgtaacactgaaagaatgtaagcgtttacccactaaggtattttcatggcgaccataaaggatgtagcccgactggcaggcgttagtgtcgccaccgtttcccgcgtcattaataatagtcccaaagccagcgaagcttcccggctggctgtgcatagtgcaatggagtctcttagctatcacccgaacgccaacgcccgtgcgctggcgcagcagaccactgaaacggtcggtctggtcgttggtgatgtttccgatccgtttttcggtgcaatggtgaaagcggtcgaacaggtggcttatcacaccggtaattttttattgattggcaacggttaccacaacgaacaaaaagagcgtcaggccattgagcaactgatccgccatcgctgtgctgcgttggtcgtccatgccaaaatgatcccggatgctgatttagccagtttaatgaaacaaatgcccggtatggtgctgatcaaccgtatcctgcctggctttgaaaaccgttgtattgctctggacgatcgttacggtgcctggctggcaacgcgtcatttaattcagcaaggtcatacccgcattggttatctgtgctctaaccactctatttctgacgccgaagatcgtctgcaagggtattacgatgcccttgctgaaagtggtattgcggccaatgaccggctggtgacatttggcgaaccagacgaaagcggcggcgaacaggcaatgaccgagcttttgggacgaggaagaaatttcactgcggtagcctgttataacgatagtatggcggcgggtgcgatgggcgttctcaatgataatggtattgatgtaccgggtgagattagcttaattggctttgatgatgtgctggtgagtcgctatgtgcgtccgcgcctgaccaccgtgcgttacccaatcgtgacgatggcgacccaggctgccgaactggctttggcgctggcggataatcgccctctcccggaaatcactaatgtctttagtccgacgctggtacgtcgtcatagtgtgagtactccgagcctggaggcaagtcatcatgcaaccagcgactaaccgcagttaaagcaattccagcgccagtaattcttcgatggtctggcgacggcgaatcaaccgcgcctgaccattatcaaacagaacttctggtaacagcggacggctattgtagttggaactcatacttgcgccatatgcccctgtatcatgcagtaccagataatcacctgccttcacttccggcaaggcgcgggtttcaacatttcccccttcctgctgggtaaagacatcgccgctttcacataacggtccggcgacgacggtttccaccgttggcgcgtgttccagagaacgaccatcagctgccagggcactgatatggtggtaactaccgtacattgccgggcgcatcagatcgttgaacccggcatcaaccagcacaaagtggcggctccccatttgtttgacgctccgcacctgagtaattaatacgccagactgcgctaccaggaagcgacccggttcaatttccagtttcacagggtggcccaaatggcgggcgatttgctcacgcgcggcattccacagaccataataatgttcggtatcaaccgcctcttcaccctgttgataaggaacagaaagcccaccgcccgcagaaatagcctgtaaatcctgaccgaattcgatgacctgacgcaccatagcaccacacacctgttccagatgggcataatcaacgccagaaccaatgtgcatgtgaatgccgaccagctgcagatgatgacgttgtatcacgtccagtgcggcgggcagatcggtgtaccagataccgtgcttgctgttttcgccaccggtattggttttttggctatgtccgtgaccaaaccccggattaacgcgcagccatacccgatgccctgggctaacctggcccagttggtcgagcatatcaacagaacccgcattcaccggaatttgcaattcactgacgcgttcaagcgtcgcctgatcgataacatctgccgtaaaaacaatatcatcggggtgcgtttgcggattgtaacccgccgccaacgcacgctctatttcgcctaagctgacggaatccactttcacgccctgctcacgcattaagcgcaaaatatgaatattggaacaggctttctgtgcaaagcgcaccacatcaaactgtttcagcgctgcaatctgccgacgaataatttgcgcatcgtagacccacaccgggcagccaaattcagcgggcaaacgcagcagattttcggcggtgagatcggtatcggtgctgaacagactatgtggcataacaaactccagataagtgcttttttatgattacgccacatcataaaaagaataaaaaatatcgatttatgtcgagtctatgcaaaaatgatatggattaccggattgcgagagagcgctaatggccgccgttaacttacgtcatattgaaatttttcatgcggtaatgaccgccggaagcctgactgaggcggcacacctgctacacaccagtcagccaaccgtcagccgcgaacttgcgcgctttgagaaggtgatcgggctgaaattgtttgagcgcgtacgtgggcgattacatcctaccgtgcaaggactgcgtctgtttgaagaagtgcaacgatcctggtacggactggatcgcattgtcagcgccgcagaaagtctgcgcgagtttcgccagggagaactgtctattgcctgcctgccggtctttagccaatcttttttaccgcagctcctgcaaccctttctggcacgttatcccgatgtcagcttaaatatcgtgccccaggaaagtccgctacttgaagagtggctcagcgcccagcgtcatgatttaggactcactgaaacgctccatacgcctgcgggaacagaacgtaccgaattactctctttagatgaagtgtgtgtgttacctccgggtcatccgctggcggtaaaaaaggtattaacgccggatgattttcagggtgagaactacatcagcctttcccgtactgacagctatcgccagttgctggatcagctatttactgaacatcaggttaaacgacgcatgatcgtagaaacccacagcgccgcgagtgtctgcgcaatggtacgggcgggggtaggtattagcgtggttaacccgctcaccgcactagattatgcggcaagcggtttagtggtgcggcggttcagtattgcggttccgttcaccgtcagcctgatccgccccctgcaccgcccgagtagtgcgctggttcaggcgtttagtgggcatttacaagcggggttaccgaaactggtcacttctcttgacgctattttgagcagtgctacgacagcataattagctcagcataaaagcgacagcatcctcggcatggatcgccgcggtatcaaacacaggcaaaacactgcgctcttctggcaccagtaaaccaatttctgtgcagccaaaaatgacgccctgtgcgccctgttctgcaaggcgagcaatcacttgcgcacaataagcgcgactcgcttcggtaaattgccccagacacagttcttcaaaaataatctgattaattttcgcccgttcatccgcttcaggaataagacaattgatggaaaattgttccgtcagccgcccgcgataaaaatcctgttccatggtgtaacgcgtacccagcagcgccacacgagtcattccggccccggtaattgcacgtccggtggcatccgcaatgtgtaagaaaggcagagtgcaacgactctcaatggcatccgccactttatgcatcgtattggtacatagcacaataccttctgcgcccgcccgctgtaagccaagcgccgcctcagccagaatgtccccggttttatcccattccccgcgacgctggcactcttctatttcatgaaaatcgacgctatgtagcagcacttgcgcagagtgaagcccaccaagccgctgtttaatgccttcatttatcaaacgatagtaaggaatggtggattcccagctcattcctcccagcaaaccaattgttttcattcctctctcctgatgtgtgttaccgcaacaaggctgaataaggaacgagacaaacgcctcaacggccaagtgcccaatctctattaacgaaaaaagggccggatgtacagcacatccggcccgtgaaatcagacgccgatatttctcaacttctcgcctgccatcagtttgcgttcgatatgttccagcgtgacatttttggtttccggaatgagccagaaagtaatgcccacaaacgcaatgttcagcgcagtgtagagccagaacgtaccggcagcgccaatgctatcaagcagtgtcaggaaggtcgcgccgataatcatattgctcacccagttcgtggtggtgctacaggtaataccgaaatcgcggcatttcagcggctgaatttcagagcacaggatccacaccactggcgcggcgctcatcgcataaccggcaatacacatcatcgtcatgccaacagagagccaggacaagccactggaagccgtaccgttatcaaactgcatcaggcaatagcccagcaccagagtgcctaacgccatcacgctgaaaccaattttcagagccggtttacgccctgctttatctaccgtaaacaccgcaataaaggtggcgaacataaaggtcagccctacgaccagagtcgcaatcatctgttgttctgtggtcgtaaagcccgccattttgaagatacgcggcgcgtagtacatgatgatgttcataccggtaaactgctgcatcgcctgcaacaacataccgagaaacacagcacgacggacgttacggttgatcttaaacagtgcccaaccgccctgttttaacttcaggctttcacgaatttcgttgagttcttctcgcgctttttcgctcgtatcgcgcagcatacgcaatacttcttccgcctcaatatgacgccccttttccgccagccagcgcgggctatttggcaggaagactaccagaataatcagcagaactgctggtaaagcaagaacccccaacattgcgcgccagttaccgctataactgaacgctgtatcggataaaaacgccagcacgatgccgagtgtgaccatcaactggtacatactgatcatcttaccgcgaacgttttcacttgccatttcagaaagatacagaggagcggtgtaagacgcgatcccgacagcaatgcccagcaccacacgagcggcgattaacatctctacgctggtcgcaaaagcggaccctatagaaccgagtacaaacaggatggcccccgccatcaggctgtatttacgccccaggcggaagctcagccaaccattaaacagcgcaccaattgctgcaccgagcatcatgctactaaccacccattcctgcaaacgactggtcagcacaaagtgatcggtaatgaacggcaacgctccggcgattacgccgatatcaagaccaaataacaatcctgcgaccgcagcagctacgctaacaaacatattcatacgccgcgtatcccgcaaagaacgtggcgttaaagcagattccgtattgatagtaaccattttttcctgccagcagagagtaagacatagtgaaaaaatacgtgaacaactcacgcaggtgtcaggtcggaaacagcataaatatggattaaattgctgcgacatgtcgttatgtgatggatattccaattttcaaattaagttgaattattgagattattattaaccacctaattttacagcagataaaattcataaagttcattaattgataattaatatggattatttcataaccatgatatggattatgatgatctacaggtataaaaaaccctgccatgcggcagggtcataaaagtaagaagaatgaattaacgcgccagccaaccgccatccacggcaatggtataaccattcacataatcactagcgctggaggcaaggaacactatcggccccatcaggtcactcggcagtccccaacgaccagctggaatgcggtcgagaatttccgcgctacgttgttcatctgcccgtagttgttgagtattgttggtcgccatgtaacccggggctatcgcattaacattaatgttgtgtttagcccattcgttcgccatcaatcgcgtcacacccatcacgccgcttttacttgcggtataagaaggcacacggatcccgccctggaaggagagcatactcgcgatattgataatcttgccgccattgccttgcgcgataaagtgtttcgccgctgcctgagacatgaagaatacgctcttgatattcaggttcatgacatcgtcccagtccttttcgctgaactcgagagcatcttcgcggcgaatcaatccggcgttattcaccaggatatcaatatgaccaaactccgctaccgcgcgatccagcagtgctggaataccatcaatctttcgcagatcggcggtcaggcttaaaaaacgacgccccagcgctgtgacctgctcgatggtttcagtcggttcaacgatgttaatgccaacaatgtcacagcccgcttgcgccagccccaacgccatcccctgacccagtccagtatcacaaccagtgacgaccgcaactttaccttcgagagaaaatgcacttaaaatcataacaataccttattcgtttatgcccacaattagcgcaaatctttaacggccacatggtccatatcatcaaagacctggttttcaccgaccatgccccagataaaggtataagctttggttccgacaccggaatggatgctccagctcggggagatcaccgcctgctcgttatgcatcacaatatgacgcgtttcttgcggctgccccatcatgtggaaaacgcaggcgtcatcatccatattgaaatagaaataaacttccatccggcgctcgtgggtgtgacacggcatggtgttccacaagttacccggagccagctccgtcagccccatactcaattggcaggtttccagtacatccgggacaaaatatttgttaatcgtgcgacggttactggtgaggttatcgcctaacgtgactggagatacttcgtccggtgtgacttttttggtgggatacgtcgtatgcgcgggtgcgcaattgtaataaaacttcgccggagtgccggtatcaatactggcaaagacaacttcttttgcacctttaccaacatacagggcgtcgcggtgaccgatttcatagcattggccatcgacagtaatcgtaccggcaccgccaatattgataacacctaactcgcgacgttcaaggaaatagcttacgccgagttgtttaccaacttccccgccaacggaaaccgttttagttatcggcataatgccgccaacaataattcggtcaatgtggctgtaaaccatggtgtactcatcggcgacaaataccttttcaaccaaaaattcattgcgcagcccttgggtatccagcgtttttgcgtgcgcactgtggatgctctgtcttacgtccacatcaacctccgataatcagtgaagcgtgaaaatagaaaacgatagtgaaacactgtttcgttttctctataaagggatgatatgcccatgggctagggttttcaattaaaaataaaacaatgtttcatttttaagttaaggattaaaaaaagtgcagtgtcgatcacgaatatgtcatgagaatggaaaaatgagggagcccagaaaatgtatgtcgacttgccagccatcattattcaacagattaatgacggcagatatttatcggtaaggaggaaatgcagagttattcgtcacgttcaatggtcaatgccacaccctggcccccgccgatacaaagcgttgccagtcctttgcgggcattacgtttcaccatttcatgaaccagagaaaccaggattcggcaaccggaagcgcctatcgggtgaccgagtgcgatcgcgccaccattgacattgacccgacgctcatcccactcaagcatcttgccaacgctaagcgcctgtgcagcaaacgcttcattagcctcgataagatcgacttcagccaactgccagcctacacgctccaggcaacggcgggtcgcatacaccggcgcaattcccatcaatgccggatctacaccaacgctggcaaatgcgcgaatgcgggccagcacgggtaaattcaacgctcgtgctttggcttcgctcatcatcattaccgcagctgcgccatcgtttatggaacttgcattacccgctgtcacagaaccgagactatcaaaactaggatttaaacgggctaagccttctgcgctggcgtcagtgcgtggctgttcatcggtatcaacaaccaacgtctgcccgttactttgggtcattaccgggacgatctcatctttaaatcgtccggcgtcaatcgccgctcgcgctttttgttggctgctaagtgcgtaagcatcctgcaactgacggctgatgccatattcgcgagccagattttcggcggtgacaccaatatgataatcattgaaggcatcccacaacccatcatgcacaagactgtcaaccaactggctattgccaagctgtgcaccggtgcggctatcagtcagaacatgtggtgcgcggctcatgttttcctggccaccggcgatgacaatatcagcctcgccacactgtatcgcctgagtagccagatgcagtgctttaagcccggaaccgcaaacgtcattaatagtgattgcagaaacgctattaggcagaccacctttaatagcgctttgccttgccggattctgccctgcccctgcagtcaacacctgaccaagaattacttcatccaccgcatatgcaggaacgccggtacgttctattaacgctttcacgaccagactaccaagttccacggcggaatgacccgctaacgcaccacgaaagcagccgataggtgtccgtaacgccccgacaatcacaacgtctttcatcacaacctcgcaccaattaacagtgcaatagtaaatgattgttaattacagttatcttaattgtttaaaaaaagtgatttttatcacaaaggaaatatgcctgagcagcagtcagagacataactggcacgtaaggtttgcaaccactaacccaccaatagaggggtagatagggcgttaatctcccatacttaacctggtttatggtaaattgccctccattttgtttaatttgtagatgatacgttcagataatgtctaatatttggtctaaagaagaaactctgtggagtttcgcgctctacggcacagccgttggtgcaggcacgctcttccttcctattcagttaggtagcgcaggggctgtggtcctgtttattactgctctggtcgcctggcctttaacatattggccacataaagccttgtgccagttcatcctcagtagtaaaacaagtgcaggtgaagggataacgggcgcggtaacacactactatggcaagaagattggtaatctgattaccacgctgtacttcatcgccttttttgtcgtcgtgttgatatatgcagtggcaattaccaacagtcttacggaacagctggcaaagcatatggttattgatcttcgcatccgtatgttggtgagtctgggtgttgtattaattctgaatctcatttttctgatgggacgtcatgccactattcgggtaatgggatttttggtattcccattgattgcctatttcttatttctttccatttaccttgtcggtagttggcaacctgatctattaacaacccaggtagagttcaatcagaatacccttcaccagatatggataagcattcccgtgatggttttcgcctttagccatacgcccattatttctacgtttgccatagacagacgtgaaaaatatggcgaacacgctatggataaatgcaaaaaaattatgaaagtcgcttatctcatcatctgcataagtgtactgttctttgtctttagctgcctgctttctattccacctagctatattgaagctgctaaagaagaaggggtcaccattttaagcgcgctttctatgctgccgaacgccccagcatggttgagtatttccgggattattgtcgcagtagttgcgatgagcaaaagtttcctgggtacgtactttggcgttattgaaggtgccacagaggtcgtcaaaacaacactacagcaggttggtgtaaagaaaagtcgtgcatttaaccgcgcactaagtattatgttggtaagcctgattaccttcattgtttgttgcattaacccgaacgcgattagcatgatttacgcgatcagcggcccgctcattgccatgatacttttcatcatgcctacgctgagtacgtatctcatcccggcgcttaaaccctggcgttccatcggaaatctgattacgctgatcgtgggtatcctgtgcgtaagcgtaatgttctttagctaatatcagttgtggatggttcaaaattgctacaattttgaaccattccatttttcataatattcatttgttattattccaccctatcacttctctcgtcatatcctagtattatcagttagttaaacacacaaagagatctgaacatcttaaataagactatttaagatgcataacttagattcgcaagatatcttctggtcattcaaaaacaatttgcgatatagatattcttataccatgagatagttatctggaccgctctcaaccatgcaagattaaatcagtgaaacataatcatatttgataacgagaaatgcatttttaaatgccttactcagaattatagcaaatacagattaatcgcaatttttcccggcaaaattacaaaatcatggtgtattgacatcatcaataaccaatgaaattatgcaattatatacggatagggaggttcttaacatggggctttgtagtcgttataaaagtcttacatgcaatagttgcagtatgcattgccaaataatgccagaagagagtccgcgtttgcagtattgcgcaaacagctgtttttgtatgtggcccgaagaaagtagttattttaatcgtggtgtggtagaaggtatcttaacaaaaaaccacaatgcgagattaagcggatatatttttgtcgattttagtgtaagttttttacgtctattccttgaaaaagactggattgactatcttgcaagtactgacatggggattgttttagtcagcgaccgcaatatgcaaagcttagctaattactggcgaaaacacaacagtgcaatatctgctgtcatatataatgatgatggtcttgatgttgccaatgaaaagatcagacaactatttattggtcgttatttaagttttaccggaggtaacacattaactcagatggaattcaccataatggggtatatggtttctggttataatccatatcagattgctgaagttctggatatggatatccgtagcatctacgcgtacaagcaacgaatcgaaaagagaatgggtggtaaaataaacgaattatttattcgtagtcatagcgtccaacattgatactcaacgaccagccagaatcatactctgtttatacgggcatttattgaaatgtccgtattttataaataggccgtcccctcaagagtaaacaccatagtatttaaaaccatcacacgaaaaattcagaagcattacgaaatatgaatttacaaacaatagtggcataaatgttaaccatgttaatttacgtaaagttttacgttgcaacattaaagcctcatttcaatcatcatgataaatataaaattaatatatatttatgccgtaaataccaatatacttagcaaactatgtgatctccatttcgattgatttagtgtttattgacgtatgtactggattattaacgataatatcgagttctggcctgagcaccgaaaattaataagcgtacataacgccgatcttaacgtcgttctgacaacgccagccagtcgatgtttaagtcttctacttgaagcttttcctgatgtggttgcacaacaagattttttcaccagagtctgggaagaagaaggtatgcgtgtgcctactaacacgttatatcagaacatatccattatcagacgcggatttcgcgctgttggtgatactacccacagcctaattgcaaccgtgccgagaagaggattcaagatccataatgacattaacatacaaaatcatgtaataaacagcagtacagacgcacatacacacaatgccccacctgccataaaagttaatgcgggatacaaagagagcattggtggcgcaaagaatttcaataacaaaatcctcaaacatataaaaagtcatctaattatgttgagcgcatttgtcataggcgcatattctgcatattggctatggaataataatcaaccgaagccatttttcaaggattacaagactgttgcggaaattaatggctgccattttaatgtaacagaagatacaattgatgggttgaaagagttcgataaatataaaacacggatactggatagcgggattaactgtaaaaaacatccgtggttatacttccctcttgcaaaatccagtccggggatgattgttatggcatgcaataaaaactataaccaacatgaagtggcaaactgtttaaccctgtcttaccgtgaggttaatcgtgattgattataaaaaaaacttattatttattttagtttttatcagtgggtttattctcttcactgtctattcttacactgcagaaaaaatgatatataacgaaacatgcactgcaaattgggtaatttttaatgaccagggacgagcaaatcttaccatcgactttatgtataacaaaaaaaataaaacaggaactgttgcgttgagtggaacctggcaacaaggtaacagagaaagtaaaagtatacggcgaaatattgaatacacatggattgaaaactatgacacagcccatttaacaagtaagaaagttaataagtttgagattatggatcaagttgatgatgatagacttgcacaacttattcctgatttttatgtctttccagaaaaaagtgtaagctataatatactaaagcaaggtaagcatgcttttattttgagcattggtaacagagcaataatgcattgtgcaaggtaaactaaaatagataacaaaaagatggaacctcgttaatcataaaacaataaaattaaatattctcgcagtatatggcagtctaaagcatcaaagatttgatcaacatctttcattttagacatctccttgcaatgtaaaatatcatgtatcaacaacatctggtgcaaatccaactgtcgaactcgacattcatcttagctcgattattattccttcgtacagtgcttgtaaacaatacagaaagaggattattaagaaccagtttactcagactatcaatagaggaaaggactaacgtttctttaaaagaattgatttcatcatctgttaaactaaactcatcattgacagatcgactgatataactgtttttaactttactctttacgttgactttattgacagaattaacattcacatatctactatttaatgtccaacttgttgtttgcgtgagaacattctcagcattaaggaatttttttaacggaatccttggtttctttttgctgtcgctatttacaatatcatgcatatagaccatttcatgaatctggctaaattcaatgtccattgtatacctcacatttttaccgtgactcgatgttactgttcaataatcaccttccatcaatactaaaattaatacccctaatgtgccgataacaaatatagtcattctacgtaacgtctccataaggtgatatttgacattatcagaagctgcgaattcggattttgctctaatcaaatgagagaaatgtaaaatgaagccacgaaatattaataatagcctaccactgcaaccattagttcctgatcaggagaacaaaaataagaaaaatgaagagaaatccgttaatccagttaaaatcacaatggggtctggtttaaattatattgaacaagaatctcttggaggaaaatatctaacacatgatttgagtataaagatagcggatatttctgaagagataattcagcaagcaatattatctgctatgagcatatataaatttagcataacagatgatttaatgagtatggctgtaaatgaactcataaaactgaccaaaatagagaataatgtagacctgaataaattcactactatatgcacagacgttctatccccccgcgtcaccagacataataaagaaaaaaacaaacgacattctacccttctcaaaaatcccctttttaattttcattgaaaaaatggcaattgatactatgaatccaggtcatacacattaaggcatttatgtaatgtcgtaattaagataactaataaggtgaatattagtaaaacaactaatgatgttattagtttgtagtgaacagtacttttaccaataatgaaaaatataccataagcaatgcaagcttaaaactcataatttaaaaaagataaatataaaaatatcaatgagtcaatcaataataatttggcatcacgagacacatcacagaggaatattatgagcacagaaacaattgaaatattcaataatagtgatgaatgggcaaatcaactaaaacacgcattaagcaaaggagaaaatctggcattactacatggtttaactcctgatatccttgatagaatatatgcatatgcattcgactaccatgaaaagggtaatataacggacgcagaaatttattataaattcttgtgcatttatgcgttcgaaaatcatgagtatctaaaagattttgcaagtgtatgtcagcccaaaaagaaatatcaacaagcatatgacctttacaaactaagttacaattacttcccgtatgatgactatagtgttatttatcgtatgggtcaatgtcagattggggctaaaaatatcgataacgcaatgcaatgtttctatcacattattaacaattgtgaggatgatagtgttaagagtaaagcgcaggcatatattgaactcttaaacgataatagtgaagataatggctaagcattacaatcatttggttaaatttgctggttatagtgcagttaaccactataaccagcacctcttatgttttcttaaatcagcatcttaaaacagttaagagcatactataaatcattatttttcaatgcgttagagaacaatctactttatcaaaattgaataaggctatttcagattacatcactgaattcctaagataaattagtgaacacaaccatagatatgtcaaatgtaatttcctgtagcgttaatgacacataaatatgaatagccataatttctattgcttaagcaggatgcaagaaaccaattttttcatagaggttaactaatggacttagaaaataaattcagttatcattttcttgagggattaacgctcacggaagatggaattcttactcaaggaaatgagcaagtttatattccacagaaagagttaggtgtattaatagtattacttgaatccgctggtcatgttgtactgaaagatatgatcatcgaaagtgtatggaaaaatattattgttagtgacgagtccctgacaagatgtatctattctttgcgctgcatttttgaaaaaattggctatgatcgttgcatagaaacaatctaccggaaaggttatcgtttcagcgggcaggttttcaaaactaaaattaatgaagataatactagtgactattccatagctatattccctttcactactagtttgaatacactggatccattaatacttaatcaggaattagtgcaaatcattagtaataaaaaaatcgatggtctctatacctatccgatggctgcgacaaatttttgtaatgatcacatatctcaaaatagtttcttgagcagattcaagccagattatttcgttacaggaagaataaaccagaataatgcagtgaacactttatacattgagttgatcgacgctaaaaaccttttcctcatcgccagtaatcatctccctgttgatgaactacataatacaagtcaatttattatagataatatccttcaaacggtacataaaccagaacgatctgtaagattagctaagcaggaccaaggatataagaatcattatttaagtgatgaaatgttagccggaaagaaagaactttacgacttcacccctgaaagcatttacagggccatgactatatttgatagattacaaaataaaagtgatatacagacgctaaaaacagaatgttattgccttctagcggaatgccatatgtctttggcacttcatggaaaaagtgaacttgaacttgctgctcaaaaagcattagagcttttagattatgtaagtgacataaccactgtcgatggaaaaattttagctattatgggactgataactggtctgtctggacaagcaaaagtatctcatatcttatttgaacaggctaagatacacagtactgatatagcctctctctactactatagggcactagtccactttcataatgaaaaaattgaagaggcaaggatttgtatagacaaaagtctacaactcgaacccagaagacgaaaagcagttgtgataaaagaatgtgtagatatgtatgtgcctaacccgctcaaaaacaacattaaactctactataaagaaactgagagtgaaagccatcgagttataattgacaacattttgaaattaaagcagctgacgagaatttgtatgcgataaatttttattgacgcaattttattatttagatgtatgcaacttgttatttaaacaacagagataaaaatatctaagatattcaccttattgcaagatatttaaaatgctctagagttaaaagtatgatgtaaagaccattggcctggacaattaaaaaagggagctttatgactaatccaatcggtatcaataatttatctcaaagtagtaatatagcgaatgcaacgggtgatgaagtcgtaagtttagataaacacatcaacaccagtgctactgatacagatcaaatacaagcatttatagttagtacatggatggcgccttttcaaaatgatatgtatagtgaagataatcctatcagtccttactataaaattgagtggtaaacgattgaccaaataaatcataacgagatacttttataatagtatctcgttcctttcattcaatcctcacacatgaaaaaatatgcgctcaccaaaagttaaattcttaaccatcttcacgttttgtatatttattacaaaaatgtctttcgccagcaactcttgctctaatgaagcaggaacaatgttcagaatcgaaccaaatttaattaaagctatcgctcttgttgaaagcaatctaaaaaaggatagcataggcaagaacagagataagaataacaatataaagagtttagattattggttaatgcagataaaccagatgcatattcccctgttaaaaaaacgtggaataataaaagatgaacgagatttgttagataacccttgtctgaacattaaaataggaaccgagattttatataaccattttagtcgttgtggagtaacgtggcaatgcctggggacttataatgcgggttttgcaatggataaccaaaaaaagagacagcaatatgccccaaaatatatattgtatataccaggcttaatgaactaaacaatcgtaaggcttcagcaaaatgagcctaaagcctcttttttttatatagtgcaaacacccatacgtaaagctgttttgatcaactcgataccactgtgaacatctaatttcttcatgatattgagtctatgagtttcgactgttttcctgcttaactgcaagaaattagcgatttctttgtttgttttaccatcagctatgagttgtaatatttcactctcacgatttgtaagttgattatcagaggaatacctggaagatattttttcacaatccatatgtacactatcaaaataagtgtaaccattactaatgctatcaatagcacgatttagtttcgccgggtgactggttttccatacgcatcctttcgcacctgcttcaagcaattttatactatcaatatacggcatctttgctacaaatgtaataatatgagcatctatcttatggcttttaacccattttacgagttcggcccccatcattccacctgcaaattctcctaaaataaatatttaggctgtagatttgttacactccgctatagctttcttcagatctttatagcccacttatttaacaacttgaaaataaggtgttttacctgggttgttacaaaaggattgcattgcgtaaacgctttttatttacaacaaaatggggaagtattacggcgaagataaattggagcgggcgaagggaatcgaaccctcgtatagagcttgggaagctctcgttctaccattgaactacgcccgcttcgagatgcgtaaggcattataaaccttacgctctccttagcaagtgccacgctgctgactgctgattaattcgccatcagcattttggcttgctgccctgaggcggcaagtaacgtagcggatcaattgccgttgcacggtaacgaatctggaaatgcaggcgaacagatgccgcatccgtgctccccatagtggcgattttttgcccagccttcacgctttgcccattatttaccagcatcgtgtcattatgggcgtaagccgtaatgtaatcttcactgtgtttaatcatgatgagattaccgtagccacgcagctggttgcccacatacaccacctttcctgcacccgcggcgtaaataggtgtaccccgtggagcactgatatcaatccctttattgccgccatctgctgtgctatacggcatgataactttccctgtcgttggccataaccaacaacgttgccctactggcggccaggaacttttcggtaccgcactactcggtgtaacgcttgcggttttggtcgtacttttggcggtacttttacgtgtaatactgctacttttcgccccacccagttttagtttctgaccaacttcaatggtgtaagggggggaaatgccgttcagtcgcgccagttcttttacgctggttcccgtggtgcggctaatacgatatagcgtatccccccgtttcacggtgtaaacggagccggaatacgttcctgtatcggaacttttgctaccgctacagcccgccaaaagcagtccaacgcttaacaacatcacgatacccagagattttttattcaggcgtcccgcactcaaaatctttcctcgcttaaaaaacaagacgccttatcatagcagccagcctcttgatacccaatctcttgcttctggaaaaacgtggtaatagagaaagaggttaatttcatttggcaaagggaagtatcatcagcaaaatattcgctgtagaggtatcgaacttcctgactttttaccctatttcccatcctgatgcgtaataatcccaatttatcacattgattttatcgccactcatattgatacgtatcactgcccctattcagagtcctgtttcgtatcatatctgtgtttttttaacgtcatcacacttcctacctcccctaacgcttatcgtcgtttctggcgtaaatcttgcctgcttagactaaatctttgccataagaaccaaatgttcaaatcgaggggatttctatggaagcgcgggaagcaaccgctacgggtgaatcatgcatgcgcgtcgatgccattgctaaggtcaccgggcgggcacgatatactgacgattatgttatggcgggcatgtgttatgcgaaatatgtacgtagccctatcgcacatggttatgccgtaagtattaatgatgaacaagccagaagtttgccgggcgtactggcgatttttacctgggaagatgtgcctgatattccattcgctacagctgggcatgcctggacacttgacgaaaacaagcgcgataccgccgatcgcgcactgctaactcgccatgttcgtcatcatggtgacgccgttgccatcgtcgtggcccgcgatgaactcacggcagaaaaagcggcgcaattggtcagcattgagtggcaagaattacccgttatcaccacgccagaagcggcgctggcagaagacgctgcaccaatccataacggtggcaatttactgaaacaaagcacgatgagcacgggtaatgtccaacaaacaatcgatgccgccgactaccaggtacaggggcactatcagacccccgttattcaacattgtcacatggaaagcgtaacaagcctggcgtggatggaggatgacagccgaattaccatcgtttccagcacccagatcccgcacattgttcgccgcgtggttggtcaggcgctggatattccctggagttgcgtacgagtcatcaaaccatttgtcggtggcggttttggtaataaacaggatgtactggaagagccaatggcggcattcctgaccagcaagcttggcggcattccggtgaaagtttcccttagccgtgaagagtgtttcctcgcaacccgtacccgccacgcttttaccattgacgggcaaatgggcgtgaaccgcgacggaacattgaaaggttatagtctggatgttctgtctaacaccggcgcttatgcatctcacgggcactccatcgcttctgcgggggggaataaagtcgcttacctttatcctcgttgtgcctacgcttacagtagtaagacctgctataccaacctccccagcgctggtgcgatgcgtggttatggcgcgccacaagtcgtatttgccgttgagtctatgcttgatgacgccgcgacagcgttaggtattgatcctgttgaaattcgtttacgcaacgccgcccgcgaaggagatgctaatccgctcacgggcaaacgtatttacagcgcagggttgccggagtgtcttgaaaaaggccggaaaatctttgaatgggaaaaacgccgtgcagaatgccagaaccagcaaggcaatttgcgccgcggcgttggcgtcgcctgttttagctacacctctaacacctggcctgtcggcgtagaaatagcaggcgcgcgccttctgatgaatcaggatggaaccatcaacgtgcaaagcggcgcgacggaaatcggtcagggtgccgacaccgtcttcagccaaatggtggcagaaaccgtgggggttccggtcagcgacgttcgcgttattagtactcaagataccgacgttacgccgttcgatcccggcgcatttgccagtcgccagagctatgttgccgcgcctgcgctgcgcagtgcggcactattattaaaagagaaaatcatcgctcacgccgcagtcatgctacatcagagtgcgatgaatctgaccctgataaaaggccatatcgtgctggttgaacgaccggaagagccgttaatgagcttaaaagatttggcgatggacgctttctaccaccctgaacgcggcgggcagctctctgctgaaagctccatcaaaaccaccactaacccaccggcgtttggctgtacctttgttgatctgacggtcgatattgcgctgtgcaaagtcaccatcaaccgcatcctcaacgttcatgatagtgggcatattcttaatccactgctggcagaaggtcaggtacacggcggaatgggaatgggcattggctgggcgctatttgaagagatgatcatcgatgctaaaagcggcgtggtccgtaaccccaatctgctggattacaaaatgccgaccatgccggatctgccacaactggaaagcgcgttcgtcgaaatcaatgagccgcaatccgcatacggacataagagtctgggtgagccaccaataattcctgttgccgctgctattcgtaacgcggtgaagatggctaccggtgttgcaatcaatacactgccgctgacgccaaaacggttatatgaagagttccatctggcaggattgatttgaggataacatcatgtttgattttgcttcttaccatcgcgcagcaacccttgccgatgccatcaacctgctggctgacaacccgcaggccaaactgctcgccggtggcactgacgtactgattcagctccaccatcacaatgaccgttatcgccatattgttgatattcataatctggcggagctgcggggaattacgctggcggaagatggcagcctacgtatcggctctgcaacgacatttacccagctaatagaagatcctataactcaacgtcatctcccggcgttatgtgctgcggccacgtccattgctggaccgcagatccgtaacgtcgctacctacggtggaaatatttgcaacggtgccaccagcgcagattctgccacgccaacgctaatttatgacgcgaaactggagatccactccccgcgcggtgttcgtttcgtcccgattaatggctttcacaccgggccgggcaaagtgtctcttgagcatgacgaaatcctcgtcgcctttcattttccgccacagccgaaagaacacgcgggcagcgcgcattttaaatatgccatgcgcgacgcaatggatattagtacgattggctgcgccgcacattgccgactggataacggcaatttcagcgaattacgcctggcatttggtgttgccgcgccaacgccgattcgctgccaacatgccgaacagactgcacaaaatgcgccattaaacctgcaaacgctggaagctatcagcgaatctgtcctgcaagatgtcgccccgcgttctagttggcgggccagtaaagagtttcgtctgcatctcatccagacgatgaccaaaaaagtgattagcgaagccgtcgccgcggcggggggaaaattgcaatgaatcacagcgaaacaattaccatcgaatgcaccattaacgggatgccttttcagcttcacgccgcaccaggcacgccgctcagcgaattactccgcgaacaaggactgctaagtgtcaaacaagggtgctgcgtgggtgaatgtggtgcctgtacggtgttggtcgacggcacagcaatagacagttgcttataccttgccgcctgggctgaaggaaaagagatccgcacgctggaaggtgaagcgaaaggcggaaaactttctcatgttcagcaggcttatgcgaaatccggcgcagtgcagtgcgggttttgtacgcctggcctgattatggctaccacggcaatgctggcgaaaccacgcgagaagccattaaccattacggaaattcgtcgcggactggcgggaaatctttgtcgctgcacggggtatcagatgattgtaaatacagttctggattgcgagaaaacgaagtaaaaggatatccggcctgaattcaggccggattcactgaggttatgtgtttaacaactcatatttcttaatcttgcgatagagcgtagcaatgccgatgcccagttcatcagcaacttgcttcttgctgttatgacgactaagcgcctcgcggatcatttgcttttccatctcctccagcgccgtgccgcccgcatcatcgagactcaggtgcgcctcactgacctctgttacatcactttgctccgttgtgccattattcagcagatttggcggcaatagcgtgctgtcgataacttcaccactaggaaccacgttaaccagatattccatcaaattgcttaactcgcgcaggtttccgggccaacgatgcttacgcaatatttcgacgacatcgggagcaatgccaggataaacgcttcccagacgacgggtatgcagatgtaaaaagtaatgcaccaatagttcaatatcttcctgacgttcacgcagcggtggcagagttatcgggataacattaagtcggtagaagagatcttcgcggaatttaccttcggcaatgaactgggccaaattctgattagttgcagaaatgatgcgaatgtcgacttgtattgggctactggcaccaatcggcagaatttcacgtgcctcaatagcgcgcagtaatttagcctgcaacattaatggcatatcacctatttcatcgagaaacagcgtgcccgtattcgccgcctgaatcaaccctgttttaccgttggcagaagcgccagtaaatgcacctttaacataaccgaacagttcgctctccagaagctgctccggaatcgcggcacagttgatagcaataaagggtttattccgtcttccgctcaacttatggattgcacgggcgacgacttctttacccgtgccgctttcaccaaccaccataacgctggatgggctgggtgcaatacggctaatgagtcgttttaattgccgcataacacggcactcgccaaccaattgttcaatatgcggttcatcaggtgcatttgctacagaaaaactggtatggctttggtgaaacgccattaaaaataattgtcggccctgaatgttatgcaattgaccaatgattaattcacttttatcgtcccaactaacaatatgctgcatatgtccatgggtaaaattactctcaaatgttaatggtctgaaacggataggtttcccaataatattattttgcacaacaccaagtgtttttaaggcagtctgattaacaaactgaacccgattttcatcatctacaactaatacgccctgatccatattatcgatcatggtcgcaaatattttactgatgttatctcctggcccctgatcctccagaagtttgctaacaaaaatggtggatatatggcgaacataatcagaaaattcgcgtaaattatcactgatatgctcttgttgctcgtgggtaacggcaatcaaacttatcaccccaacacaacgatcctgtaaaatgacaggcgtacccagaaatgctttttcgcggcaattttctttactatcgcaaccttcgcaaaggggatcgaagcgagactgtgtcacaactttttcagttttcgtttccaggacgtggcggagcaggcgactgttgccgctcaactggcgaccaagaaacttcccatacgcgcccgttccggcaacgcgacacaagttttcatcaacgatctcaacctcaagctgcaaaacgctggcaagcattctggcaaaacgctgaattgtcggttgaatttgcatcaatacactctgcgtagtagcaagctccatagctttaccttccagacttacttaaaagtcgatcattgaagacgttgatggttcacagatcatgatgatattaactcaggcgaaattggctttgataaaaacataagatttttatcattttctaatgaaattatggaagagatatcacatttctatatcaatatgagaattacggcggtgagtttatcaaactgaagagagatagcctgcccctttatcttatttctgatacttagcagcaaataaataacgcgataaaaaaagccaaacgttttcgtattttacaaacaaccagaagctggcatcaatttgtgatcaaccccacacattatccgtcaaattagtcttttgcagccgcgcggataattctggcacacttattgttagtcccaggtatagctgtgaaaacaccaatcactttggcaagtcacagtgaaataaaccactttgcctgtcattccactaccgggactttatgatgaaaactgttaatgagctgattaaggatatcaatagcctgacctctcaccttcacgagaaagattttttgttaacgtgggaacagacgccagatgaactgaaacaagtactggacgttgccgcagcattaaaagcactgcgtgctgaaaacatcagtaccaaagtctttaatagtggattaggtatttccgtattccgcgacaactccacccgtacccgcttctcttatgcttccgcgcttaacctgctcggccttgcacaacaagatctcgacgaaggcaaaagtcaaatcgctcacggcgaaaccgtgcgtgaaaccgccaatatgatctccttctgcgccgacgctattggtattcgcgacgatatgtatctgggcgcaggcaacgcctatatgcgtgaagttggcgctgcacttgatgacggttacaagcagggtgtactgccacagcgtccggctttagtgaacctgcaatgcgatattgaccacccgactcagagtatggctgacctcgcgtggttacgtgaacactttggtagtctggaaaacctgaaaggtaaaaaaatcgccatgacctgggcctactctccaagctatggcaaaccgctctctgtaccacaaggcatcatcggtctgatgactcgcttcggtatggatgtcaccctggcccatccggaaggctacgacctgatcccggatgtggttgaagtggcgaaaaacaatgctaaagcctccggtggtagcttccgtcaggtcaccagcatggaagaagccttcaaagacgcagacatcgtttatccgaagagttgggcaccttacaaagtgatggaagagcgtactgaattgctgcgtgcgaacgatcacgaaggcttaaaagcactggaaaaacagtgtctggcacagaacgcgcaacacaaagactggcattgtactgaagagatgatggaactgacccgtgatggcgaagccctgtacatgcactgcctgccagctgatatcagcggcgtatcctgtaaagaaggtgaagtgactgaaggcgtattcgaaaaataccgtatcgctacctacaaagaagccagctggaagccttatatcatcgccgcgatgatcctgtcccgtaaatacgccaaaccaggtgcactgctcgagcaactgctgaaagaagcgcaagaacgcgtgaaataacccctcgggccgatcagctggtcggccctctatttccagaggccaaaaggataggatatgtccgttttcagtttgaagattgatatcgccgataacaaatttttcaacggcgaaacaagtccgctctttagccaaagccaggccaaactggcgcgccagttccaccagaaaatagctggttatcgcccaacaccgctttgtgcgctggacgatctcgcaaacctttttggtgtgaagaaaattctcgtcaaagacgaaagtaaacgattcggtctgaacgccttcaaaatgcttggcggtgcgtacgccatcgctcaattattgtgtgaaaaatatcatcttgatatcgaaacgctgagttttgagcacctgaaaaatgccatcggcgaaaaaatgactttcgcgaccaccaccgacggcaaccacgggcgcggtgtggcgtgggcagcacagcaactcggacagaatgcggtgatttacatgccgaaaggttctgctcaggaacgcgttgacgccattctgaacctcggtgccgagtgcatcgtcacggatatgaactatgacgataccgttcgcctgaccatgcaacacgcgcagcagcacggctgggaagtggtacaggacacggcatgggaaggttacaccaaaatcccaacctggatcatgcaaggctacgcaaccctggcagatgaagccgtcgagcaaatgcgtgaaatgggcgtaaccccgacgcacgttctgctgcaagccggtgtcggagcaatggccggtggtgtgctgggttatctggtcgacgtctatagcccgcaaaatctgcacagcattattgttgaacctgacaaagctgactgtatttatcgctccggcgtcaaaggcgacatcgtcaacgttggcggtgatatggccaccatcatggcaggcctggcctgtggcgaacctaacccgctgggctgggaaatcctacgtaactgcgccacccaattcatctcctgccaggacagcgttgccgcattaggtatgcgcgtgctgggtaatccgtacggcaacgacccgcgcatcatctccggtgaatccggcgctgtcggtttgggcgttctcgcagcggttcattatcacccgcaacgtcaaagcctgatggaaaaactggcgctgaacaaagatgccgtggtgctggttatcagcactgaaggcgacaccgacgtgaagcactaccgcgaagttgtctgggaaggcaaacacgctgtagcaccttaatcaccctattggaactgctccctgcaaaacggggagtaaaaaatctggagaaaaataatggctaagaatattccattcaaactgattcttgaaaaagcaaaagattaccaggcggatatgactcgcttcctgcgcgacatggttgctattcccagtgaaagctgcgacgagaaacgcgtagtacatcgtattaaagaagagatggaaaaagtcggcttcgataaagttgaaatcgacccgatgggcaacgttctcggttatatcggccacggcccgcgtctggtggcaatggacgctcatatcgataccgtcggcattggcaacatcaaaaactgggacttcgatccgtacgaaggcatggaaactgatgaactgattggtggtcgcggtacttccgaccaggaaggtggcatggcctctatggtttatgccggtaaaatcattaaagacctcggtctggaagatgaatataccctgctggttaccggtacggtgcaggaagaagactgcgacggtctgtgctggcagtacattattgaacaatccggcattcgcccggaatttgtggtcagtaccgaaccaaccgactgccaggtataccgtggtcagcgcggtcgtatggaaattcgtattgatgttcagggtgttagctgccacggttctgcaccagaacgcggtgataacgccattttcaaaatgggtccgattcttggcgaattacaagaactctcccaacgtctgggttatgacgaattcctcggcaaaggcaccctcaccgtttctgaaatcttcttcacatccccaagccgttgcgctgtagcagacagctgcgcagttagtatcgaccgtcgtctgacctggggcgaaacctgggaaggcgcgctggacgaaatccgcgccctgcctgcagtacagaaagctaacgcggttgtttctatgtacaactacgaccgtccgtcctggactggcctggtttacccaaccgaatgctacttcccgacctggaaagtggaagaagatcacttcaccgttaaagcactggtgaatgcctacgaagggctgtttggcaaagcgccggttgttgataagtggaccttcagtactaacggcgtatctatcatgggccgtcacggcattccggtgatcggctttggcccgggtaaagaacctgaagcgcatgcacctaacgaaaaaacctggaaatctcacctggtgacctgtgccgcgatgtacgctgcaatcccgttaagctggctggcaacagagtaattactcttcacttattcccctccggttcgccggagggtttttggagtttgctatgcgcgtattgatcaaaaacggcactgtcgttaacgcagatggacaagccaaacaggatttgctgattgaaagcgggattgttcgccagttgggcaacaatattagcccgcagctcccgtatgaagaaattgatgccactggctgttacgttttccctggcggcgtggatgtccatacgcatttcaatattgatgtcggcatcgcgcgcagttgtgatgatttttttaccggtacccgcgcagctgcgtgtggcggtacaacaaccattattgaccatatgggatttggcccaaacggctgtcggttacgccatcaactggaggtttatcgtggttatgccgcccataaagcggtcatcgattacagctttcacggtgtgatccagcacattaatcacgcaatcctcgacgaaatcccgatgatagtcgaggaaggactgagcagttttaaactctatttaacctatcaatacaaactcaacgatgacgaggttttgcaggcattacgccgcttgcatgaatccggcgcgctgaccaccgtgcacccggaaaatgatgcggctatcgccagcaagcgggcggaatttatcgccgcagggttaaccgcgccgcgctatcatgccttgagtcgccctctggaatgcgaagcggaagccatcgcccgcatgattaacctggcacaaattgccggtaacgccccgctctatatcgtgcacctgtctaacggcttaggtctggattatctgcgtcttgcccgtgcgaatcaccagccagtctgggttgaaacctgcccacaatatctcctgttggacgaacgcagttacgatacagaagatggcatgaagttcattcttagcccaccgctgcgtaacgtacgcgagcaggacaaactgtggtgtggcatcagcgatggtgcgattgacgtggtggcaaccgatcactgcaccttcagcatggctcaacgcctgcaaatttctaaaggcgatttcagtcgctgcccaaatggcttacccggtgtggaaaaccgcatgcagttactgttttccagtggcgtgatgacgggacgtataacaccggaacgctttgttgaattaaccagcgcaatgcccgccaggttgtttggcctgtggccgcaaaaaggattattagcgcccggttccgacggcgacgtggtgattatcgacccacgtcagagccaacaaattcagcatcgccatctccacgacaacgccgactacagcccatgggagggttttacctgtcagggcgcgattgtcagaaccttatcccgtggtgaaacgattttctgtgacggcacctttacaggcaaagccgggcgaggtcgtttcctgcgacgcaaaccgtttgtccctcccgtgctctaaccactgccagggatctatacacaatcaagaatgatgagtgaggaaaaatgagtaagaaaattgttctcgccctgggcgggaatgcgctgggcgatgacctggccgggcaaatgaaagcggtaaaaattacttctcaggcaattgttgatttaattgcccagggacatgaagttatcgtcactcatggtaacgggccgcaggtgggcatgattaaccaggcctttgaagctgccgcaaaaactgaagcgcacagcccaatgctgccgatgtctgtctgtgttgcattaagccagggttatattggttacgatctacaaaacgctttaagagaagaactgctttctcggggcattaataaacctgtagcaacgctggttactcaggtcgaagtcgacgctaacgatccggcattcctcaacccgaccaagccgatcggtagcttctttaccgagcaagaagcagagcaactgacaaaacagggttacactctgaaagaagatgctggtcgcggctatcgccgtgttgttgccagcccaaaaccggttgatatcattgaaaaagaaacggttaaagctctggtagatgcaggtcaggtggtgatcaccgttggcggtggtggtatccctgttattcgtgaaggtaaccatctgcgtggtgccagcgcggttatcgataaagactgggccagcgcccgtttagcagaaatgattgatgccgatatgctgatcattctgactgcggtagaaaaagtggccattaacttcggtaaagagaatgaacagtggctcgatcgcctgagtttaagtgatgctgaacgctttatcgaagaaggtcattttgcgaaaggttctatgctgcctaaagtggaagctgccgccagctttgctcgctctcgcgcaggtcgtgaagcactgattaccgtattgagcaaagcgaaagaagggattgaaggcaaaacaggaacggtgatttgtcagtaatttaaaggccgggtgggtaataccatccggccaaagattgtcaagtaagtgcgctttgttgatgccggatgcggcgcgagcgccttatccgtcctacaaaacatcgcaaattcaatagattgcaatgcacttgtaggcctgataagcgtagcgcatcaggcaatttggcgtttgtcatcagtctcaggccgggtgggtaataccatccggccattttcatttaagccacttccagcacttcttttgtcgctttcacgccctgatgcatcaacatcattaacgcctcaagtacgccgccgccaatcgcccgggctttatcagaaacgctggtgaaatcagcggtttcaccacgaggatcgatatcaccaattttaaaaccaccaaccactgccaggccgtcgttcaacaagccacgcaccatccccgtcaacggtgctttaatttcatgctcaccaatccaggcaatcacatcgccctctttcaccagatcgcctaatttcacgttggatcgcataatgcctgcagcaggagcacggatcacccgtcgggtggtatgccccataatattgccaggaacaccggtattctcctgcgcacaaccagagtaaatcacctgaccgagccagtgcccgcgatttgtttcaattaccgcatgacaatccttcccagcagtaaagcccggcccaagcgcgattgttactggtgccatatctgcccgcgttcccaaattctgtttcgccagaatagcgtccaccacgcaaagcggtttcagttcatcaagcaaactacaggcgggatctaccatcacaggaatgaatccgcgttcggtaagtttcatcgcttccgcagagctggttgccaggcgagcagtgacgccttcgaccgtcatttcgccatcgaacacggcctgggcaaacgccacggtacaacgaatcactgtcggtttttccacttccagcatgatcactttaaaacccgcatgatacagacgtagcgccacaccactggcgatatctcccgcaccgcgaatcaccaccagctggtgtccggaaggatgagaaggtttcatcatcagcccacccggcgcgttatttttcacctgtaatatttctgccagcacgctgatggcgatctcctgcggcgtttccgcacctatgttgtaaccaacgggcgcatgtaaacgggcaatatgttcttcagccacgcctttctcacgcaattgacgcaggaaaagctgaaccttgcgacgacttgccagcaaccccaaccatgcaatgggctgttcaatgagtttgtcgagggcttcacgatcctgattattcgtggcaatcaggacaaaattatcagggcgaatatccagtgcttccactgccgcaccaaagctctcagcatggagaagcgtggtacttggtgggaatagttcaggattgaggctttcgcgataaatatcagcaacggcaatatcaaatcctaatagcgccgcactctgggctatcgcccggttgacatgccccgcgccaatcaacaccagacgtggacgcataccatggacgctgataaatacactcattgcacctccacaatcactcccgacagcatccgcaccgttacgagccatacgtccatggaataatcgcggcttacgttcctgcaatgcctgaaggctctcttcaatcaccttccgctcaaccattccgccaccaattgtaccgacgatagaaccatcggcgcgcactaacatttgtgcagaatggcggggagtgctgcctcggctatcaacaatttgcgccatagcaaacggacaattttgctcttcgagttttgcagcctctgtgaaaatattcataccaacctcaatggatatcctttcagtaacccggaatacccgggccgttaattcacaaatctgcgcgcgattgcaggatgttcttgtatatcgcccagccagattgcctctacgtcgtgttgttgcagcggttgaaggagctcgctttgtgcaatcgcattctcacattgagaaaaacggttaatgaaccagactcgccgacaaccttgcggtacgtttttaaacgccccctgagggtggcgaaccagcgcaacgagatcgctcagttgcaaggttgcatcaggtgttaacccggtaatatcagcaaactggctccagcgatggacattttctgtgctcactttcgcgcccaaagtatgtcctcccatcacagcaatcacgcagcaactgcttttgggtatgcaaggttcgtgctcatcaggcgcttttaacggcattccacggctgccatctgcttcaatgagaattacgtcacactctggtcgttgcaccagtgcatcaatcgcttctggcgtaaatccctgcacttttccctggttcgctttccagctgtgaaaacaaaaactaatgggggatgtaagagacgcatgaggaagcatggcgggatcacgacagaaaaccacgggccagtgagacgttggcataaacatatgtgtcgtcgtcgtgattaacacacgcctgccgctagcctggagcagttctgccagccaaaaaagcaagctggttttccccccagcaccaacaacagaaatcacagtgggacgtttctgcgcacctaaatcaatgactaatgcgcttgggtcaactatacttttcacgagtctttatgacctctctgggataaattatccccaacttaatccatcaggaagtaacgcaattatcaggcgttattagcccctataaataatggaaccactatgagtgccatcgactgtataattaccgctgccggattaagtagtagaatggggcaatggaaaatgatgttaccctgggaacagggaacaattcttgatacaagtatcaaaaatgcgttgcagttttgtagccgaattattttagtcaccggctatcgtggtaatgaactgcacgaacgttatgcgaaccagagcaatatcactattattcacaacccagattatgcgcagggtttactaacatccgtcaaggccgcagtacccgcagtgcaaacagaacattgttttctcacccacggtgacatgccaaccctcaccatcgatatttttagaaaaatctggagcttacgaaatgatggcgcaatactgccactccataatggcatccccggccatccgattttagtgagtaaaccatgcctgatgcaggcaatccaacgacccaatgtcaccaatatgcgtcaggcactccttatgggagatcattattccgtcgaaatagaaaatgcagaaataattttagatattgatactccggacgactttattacagcgaaggaaaggtatactgaaatttaaaaaacgtagttaaacgattgcgttcaaatatttaatccttccggcactcattatcataatgataaggaatcactgattttgagaaaagagaaaaattgataaatgggctggcaataataattttcaggagtgattttaattctcatttagcacctgtgagttcattcacaaaaagcccttaagtttcgagccgcctcacatttttttatatttcccgccaaacctggcaagagtggtgcgattgttgctctatccccctaaaccaccggatttctcaacaccggtcactcaatgatatctgtataagctaaggagagggttatgggggatattatgcgtcccattccgtttgaggaacttttgacgcgcatatttgatgaataccaacaacaacgcagtatctttggtattcccgagcaacagttttacagtcctgtaaaaggtaaaactgttagcgtcttcggtgaaacctgtgccactcccgtcggccctgccgctggcccgcacacgcagctcgcgcaaaatattgtcacttcctggctgactggcggacgcttcatcgaactaaaaaccgtccaaattcttgaccgcctggagctggaaaagccctgtatcgatgccgaagacgagtgctttaacaccgaatggtctaccgagtttaccctgcttaaagcctgggatgaatacctcaaagcctggtttgccctgcaccttctcgaagcgatgttccagccttctgattccggtaaaagcttcatctttaatatgagcgtcggttacaacctcgaaggtattaagcaaccgccgatgcaacagttcatcgacaatatgatggacgcatctgaccatccgaaattcgctcaatatcgcgatacgctgaataaattactccaggatgacgcatttttagctcgccacggattgcaggaaaaacgcgaaagcttgcaagccttacccgctcgcatccccaccagtatggtgcatggcgtcaccctctccaccatgcacggctgtcctccgcatgaaatcgaagccatttgccgctacatgctggaagaaaaagggctcaacacctttgtgaaacttaacccgaccttactggggtacgcgcgtgttcgtgagatcctcgatgtctgcggtttcggttacataggcttaaaagaagagagttttgatcacgacctcaagctgacgcaagcactggaaatgctggaacgcctgatggcactggcaaaagaaaaaagtctcggctttggcgtaaaactgactaacactctcggcaccatcaacaataaaggcgcactgcctggtgaagagatgtatatgagtggccgtgcgctgttcccgctctccatcaatgttgcagcagttctctctcgcgcctttgacggcaaactgcccatttcttattccggtggtgccagtcagctgactatccgcgatatttttgatacaggtattcgccctattactatggcaaccgacctgctgaaacctggcggctatctgcgcttaagtgcctgcatgcgcgagctggaaggctccgacgcctggggacttgaccatgttgacgtcgaacgactgaacagactggcagcagatgcgttaaccatggaatacacccagaaacactggaagccagaagagcgtattgaagtggcagaagacctgccgctgaccgactgctacgttgccccctgtgttactgcctgcgctatcaagcaagatattccggaatacatccgtctgcttggcgaacaccgctatgccgacgcgctggaactcatctaccaacgcaacgctctgcccgccattaccggtcatatttgcgatcaccagtgccaatacaactgtacccgcctggattacgacagtgcgctgaatatccgcgaactgaaaaaagtcgcgctggaaaaaggttgggatgaatataagcaacgctggcacaaaccagccggttctggtagtcgccatccggttgccgtgattggtgcaggtccggcgggtctggcagcaggttacttccttgccagagcgggccatccggttacgctgtttgaacgcgaagccaatgcgggcggcgtggtgaaaaatatcattcctcagttccgtattcctgcagagttaattcagcacgatatcgattttgttgccgctcacggcgtgaaatttgagtatggctgcagtcccgatttaaccattgagcagttaaaaaatcagggcttccactatgttctgattgccaccggcactgataaaaatagcggtgtgaaactggcgggcgacaaccaaaatgtctggaaaagtctccccttcctgcgtgaatacaacaagggtacagcgctcaagctgggcaaacatgtggtcgttgtcggggcgggtaacaccgcaatggactgcgctcgtgcggcgttacgcgttccaggcgtagaaaaagcaacgatcgtttaccgtcgtagtctacaagagatgcccgcatggcgcgaagagtatgaagaagcgttgcacgacggcgtagagttccgtttcctgaataatccggaacgtttcgatgctgatggcaccttaaccttgcgcgttatgagccttggcgaaccggatgagaaaggtcgtcgtcgtccggttgaaaccaatgaaacagtaacactgcttgtagacagcctgatcaccgccattggtgaacagcaggatactgaagccctgaatgcgatgggcgtgccgctggacaaaaacggctggccagacgtcgaccataatggcgaaactcgtctgactgacgtctttatgatcggcgacgtacagcgcggaccatcctccattgtcgctgctgtcggaaccgcgcgtcgggcgaccgatgccatccttagtcgggaaaatatccgttcccaccagaacgataaatactggaacaacgtcaatccagcggaaatctatcaacgtaaaggcgatatctctatcacgctggtgaacagtgacgatcgtgacgcgtttgtcgcccaggaagccgctcgctgcctcgaatgtaactacgtttgcagcaagtgtgtggatgtctgcccgaaccgcgccaacgtctccattgcggtcccaggcttccagaaccgtttccagacgctgcacctcgacgcttactgtaacgaatgcggcaactgcgctcagttctgtccgtggaacggtaaaccgtacaaagacaaaatcaccgtcttcagcctggcgcaagactttgataacagcagcaacccaggcttccttgtggaagattgccgggtacgagtacgtctgaataaccaaagctgggtgttaaacatcgacagcaaaggtcagtttaacaacgtaccaccggagctgaacgatatgtgccgcatcatcagccatgtccaccagcatcatcattatctgctgggccgcgtggaggtgtaatcatgttgattctgaagaatgtcactgcggtacagctacacccggcaaaagtgcaggaaggcgttgatatcgccatcgaaaacgatgtgattgtcgctatcggcgatgccctgacgcaacgctaccccgacgccagcttcaaagagatgcatggccggattgtgatgccagggattgtctgcagccacaaccatttttacagcgggctttcccgcggaattatggcaaacatcgccccttgcccggatttcatcagtacgctgaaaaatctctggtggcggctcgatcgcgcccttgatgaagagagcctctattacagcggactgatttgttccctggaagcgattaagagcggatgtacaagcgttatcgatcaccatgcctctccggcgtatatcggcgggagcctctccacattgcgcgacgcatttttaaaagttggcctgcgcgcgatgacctgttttgaaactactgaccgtaacaacggcatcaaagagttgcaggaaggtgtagaagaaaacatccgtttcgcccgtttgattgatgaggcgaagaaagcgacaagcgagccgtatctggtggaagcacatatcggtgctcacgcgccgtttaccgtgccggatgccggtctggagatgctgcgtgaagccgtgaaagccacaggccgtggtttgcatattcacgctgcggaagacctttacgacgtttcctacagtcaccactggtacggcaaagacctgctggcacgactggcgcaattcgatctcatcgacagcaaaacgctggtcgctcatgggctgtacttgagcaaagatgacatcaccctactcaatcagcgcgatgcgttcctggtgcataacgcccgtagtaacatgaacaaccatgtcggctacaaccatcaccttagcgacatccgcaatctggcgttgggaacggacggcattggtagcgacatgtttgaagagatgaaatttgccttctttaaacatcgcgatgcgggtggtccgctgtggcctgacagttttgccaaagccctgactaacggtaacgaactgatgagccgcaactttggcgcgaaatttgggcttctggaagccggttacaaagctgatttaaccatttgcgattacaacagcccgacgccgctgctggcagacaatatcgccgggcatatcgctttcggtatgggcagtggcagcgttcacagcgtgatggtcaatggtgtgatggtctatgaagaccgtcagtttaacttcgattgcgattccatttatgcacaagccagaaaagccgctgccagtatgtggcgtcggatggatgcgctggcataaatgacagatgccctcttcccgcagggaagagggttaaataaggaaagaagatgattgaacaatttttcaggcccgactctgtcgaacaggcgctggaactgaagcgccgctaccaggatgaagccgtctggttcgccgggggcagcaaactcaatgctacaccaacccgtaccgataaaaagattgccatttccttacaggatctggaactggactgggttgactgggataacggtgcactgcggattggcgcaatgtctcgcttgcagccactgcgtgatgcgcgatttattcctgcagcgctgcgtgaagccctcggttttgtttacagtcgccatgttcgtaatcagagcaccattggtggtgaaatcgccgcccgccaggaagagagcgtgctgcttcccgtcctgttggcactggatgctgaactggtttttggcaacggcgaaacgctgagtatcgaggactacctggcctgcccatgcgatcgcctgctaaccgaaattatcattaaagatccgtatcgcacctgtgcgacccgcaaaattagccgttctcaggcaggtttaaccgtcgtgacggcagccgttgcaatgacagaccacgacggtatgcgaattgcgctggatggcgtcgccagtaaagcactgcgtctgcatgatgtcgaaaaacaaaatctggaaggcaatgcacttgaacaggctgtcgccaacgccattttcccgcaggaagatttgcggggcagcgtggcctataaacgctatatcacgggagttctggtagccgacctgtatgccgactgccaacaggctggggaggaagccgtatgatcatccactttactttaaatggcgcgcctcaggagctaaccgttaatccaggcgaaaacgtgcaaaagctgttgtttaacatgggaatgcactctgtacgcaacagtgatgatggtttcgggtttgccggttctgacgcaataatctttaacggtaatatcgttaacgcgtccttgcttattgccgcacagttagagaaggcagatattcgtaccgcagaatctctgggcaaatggaacgagttaagtctggttcaacaggcaatggttgatgttggcgtggtgcagtctggttataacgatccagctgcagctctgattatcaccgatcttctcgatcgcatcgccgcacctacccgcgaagagatcgacgacgcgctttctggtttgttcagccgcgatgctggctggcagcaatactatcaggtcattgaactggcggttgcacgtaaaaataatccgcaggccaccattgatatcgctccgactttccgtgacgacctagaagtcattggtaagcattatcctaaaactgatgccgcgaaaatggtgcaggcgaaaccctgctatgttgaagaccgcgtaacggctgacgcctgcgtcattaaaatgttacgtagcccacacgctcacgcactgattactcatctggatgtcagcaaagctgaagccttaccgggcgtcgttcacgttattactcacctgaattgcccggatatctactataccccgggtggtcagagcgcaccggaaccgagtccgcttgaccgccgtatgttcggcaagaaaatgcgtcacgtcggcgatcgtgttgctgcggtcgtcgcagaaagtgaagaaattgcgctcgaagcactgaagctcatcgacgttgaatatgaagtgcttaagccggtaatgagcatcgacgaagcaatggcggaagatgcgcctgtcgtgcacgatgaaccggtggtgtatgttgctggtgcgccagatactctggaagacgataacagccatgcagcccagcgcggcgagcatatgatcatcaacttcccgatcggttctcgccctcgcaaaaatatcgccgccagtattcatggtcatattggcgatatggacaaaggctttgccgatgccgatgtgatcattgagcgaacctataacagtacgcaagcgcagcagtgcccgactgaaacacatatctgctttactcgtatggacggcgatcgtctggttatccacgcctccacccaggtaccatggcacttacgccgccaggtcgcgcgcctcgtgggcatgaaacagcataaagttcatgtcattaaagagcgagttggcggcggttttggttccaaacaggacatcctgctggaagaagtgtgcgcctgggcaacctgcgtgaccgggcgtccggtactgttccgctacacccgtgaagaagagtttattgctaacacctctcgtcacgtcgcgaaagtcaccgtcaaactgggagcgaaaaaagatggtcgcctgacggcagtgaagatggatttccgcgccaacactggcccttacggcaaccacagtctcaccgtaccgtgtaacggaccggcgctgagcctgccgttatatccgtgcgataacgtcgatttccaggtcaccacctactacagcaacatttgcccaaatggtgcttatcagggttatggcgcaccgaaaggtaacttcgctatcaccatggcattagcggaactggctgaacagttacagatcgaccaactggaaattatcgaacgtaaccgggtacacgaagggcaagagctgaaaattctcggtgcaatcggtgaaggtaaagcgccgacctccgttccttccgccgccagctgtgcactggaagagatcctgcgtcagggtcgcgagatgatccaatggagcagtccgaaaccgcaaaatggtgactggcacatcggtcgcggcgtcgccattatcatgcagaaaagcggtatcccggatatcgatcaggctaactgcatgatcaaactggaaagcgacggcacctttatcgttcattctggcggtgcggatattggtactggtctggatactgtagtgacgaaactggcagcagaagtgctgcactgcccaccgcaggacgtgcatgttatctccggtgataccgatcatgcgttgtttgataaaggcgcatatgccagctccggtacttgcttcagcggtaacgcggcgcgtttggcagcggaaaatctacgggagaaaattctgttccacggcgcgcaaatgttgggtgagccagtggcagatgttcaactggcaacgccgggcgtcgtgcgcggcaagaaaggcgaagttagtttcggggatattgcccataaaggcgaaaccggcaccggctttggtagtctggtgggaactggcagttatatcacgcctgatttcgccttcccgtatggcgcaaacttcgctgaagttgccgtcaacacgcgtacgggtgaaatccgcctggataaattctacgccttgctggactgcggtacaccggtcaatccagagttagcgttgggacaaatctacggtgccaccctgcgtgctatcggccacagtatgagcgaagagatcatttatgacgccgaaggtcacccgttaacgcgtgatttacgcagttacggcgcaccgaaaattggtgacattccgcgtgatttccgcgctgtgctggtgccgagcgacgataaagtcggcccgttcggggcgaaaagcatcagcgaaatcggtgtaaatggcgcagctccggcgattgctaccgcaattcacgatgcatgcggcatctggttacgcgaatggcatttcacaccggagaaaatactcactgcgctggaaaaaatataaataataaatggccgcttcggcggcctgtttctctgtttgaacgatgactaaatagtgactgcgaaaatgagataagccgttctcaaggcgtcctgcgccccaaattcgtgggaatttattttactaattcagatgatcaaatttactttaaaaggagtgaagggatgtctgatataaaccatgcaggttctgaccttatatttgaactggaggatcgccctccctttcatcaggctctcgttggtgccattacccatctgttggcaattttcgttccgatggtaacccccgcgttaatcgtgggtgcggccttacagctttccgctgaaacaactgcctatcttgtttctatggcgatgatcgcctctggtattggtacctggttacaagtaaaccgctacggcatcgtcggttctggcctactcagtattcagagtgtcaattttagttttgttacggtcatgattgcgctgggcagcagcatgaaaagcgacggttttcacgaagagttaatcatgagcagccttctcggcgtctccttcgttggcgcatttctggttgtcggatctagttttatcttgccctatttacgtcgggttattacgcctaccgtcagcggtattgtggtactgatgatcggcttaagcctgattaaagtcggcattatcgattttggtggaggatttgcagccaaaagcagcggtacgttcggcaattacgaacatctcggcgttggtttattggttttaattgtggtgatcggctttaactgctgtcgcagtccgttgctacgcatgggagggatcgccattgggctatgtgtcggctatatcgcaagcttatgcctgggcatggtggatttcagcagtatgcgcaatttgccgttaatcaccatcccgcatccgttcaaatacggctttagttttagcttccatcagttcctggtggttggcacgatttatctgcttagcgtgctggaagcagtcggcgatatcaccgccacggcaatggtttcccgccgccccattcagggggaagagtatcagtcccggctgaaaggcggcgtgctggcagatggtctggtttctgttatcgcctccgctgtcggtagtttaccattaaccacgtttgcgcaaaataatggggttattcagatgactggcgtcgctagtcgttatgtcgggcgaaccatcgcggtaatgctggttatcctcggcttatttccgatgattggcggcttcttcacgaccattcccagcgcagttctgggaggcgcaatgacgttgatgttttccatgattgccatcgcagggattcgcatcatcatcaccaacggtttaaagcgccgtgaaacacttattgtcgccacttctttaggtttagggcttggcgtctcctacgatcccgaaatttttaaaatattgccagcctctatttatgtattagttgaaaaccctatttgtgctggcgggttaactgcgattttattaaatattatcctccctggtggctaccgacaggaaaacgttctgcctggtattaccagtgcggaagagatggattaacagtaaaggagtcaatgatgagtggagaacacacgttaaaagcggtacgaggcagttttattgatgtcacccgtacgatcgataacccggaagagattgcctctgcgctgcggtttattgaggatggtttattactcattaaacagggaaaagtggaatggtttggcgaatgggaaaacggaaagcatcaaattcctgacaccattcgcgtgcgcgactatcgcggcaaactgatagtaccgggctttgtcgatacacatatccattatccgcaaagtgaaatggtgggggcctatggtgagcaattgctggagtggttgaataaacacaccttccctactgaacgtcgttatgaggatttagagtacgcccgcgaaatgagcgcgttcttcatcaagcagcttttacgtaacggaaccaccacggcgctggtgtttggcactgttcatccgcaatctgttgatgcgctgtttgaagccgccagtcatatcaatatgcgtatgattgccggtaaggtgatgatggaccgcaacgcaccggattatctgctcgacactgccgaaagcagctatcaccaaagcaaagaactgatcgaacgctggcacaaaaatggtcgtctgctatatgcgattacgccacgcttcgccccgaccagttctcctgaacagatggcgatggcgcaacgcctgaaagaagaatatccggatacgtgggtacatacccatctctgtgaaaacaaagatgaaattgcctgggtgaaaagcctttatcctgaccatgatggttatctggatgtttaccatcagtacggcctgaccggtaaaaactgtgtctttgctcactgcgtccatctcgaagaaaaagagtgggatcgtctcagcgaaaccaaatccagcattgctttctgtccgacctccaacctttacctcggcagcggcttattcaacttgaaaaaagcatggcagaagaaagttaaagtgggcatgggaacggatatcggtgccggaaccactttcaacatgctgcaaacgctgaacgaagcctacaaagtattgcaattacaaggctatcgcctcagcgcatatgaagcgttttacctggccacgctcggcggagcgaaatctctgggccttgacgatttgattggcaactttttacctggcaaagaggctgatttcgtggtgatggaacccaccgccactccgctacagcagctgcgctatgacaactctgtttctttagtcgacaaattgttcgtgatgatgacgttgggcgatgaccgtagcatctaccgcacctacgttgatggtcgtctggtgtacgaacgcaactaataataaaactttaacatcctcgtgaggacatcattatgtctggagacatcctacaaacaccggacgcaccaaagccacagggcgcgctggataattattttaaaattaccgctcgtggcagtaccgttcgtcaggaagtactggctggcttaacgacctttctggccatggtttattccgttatcgtcgttccgggaatgctgggcaaagcaggttttcctcccgcagctgtgtttgttgccacctgtctggtcgcgggcttcggcagcttgctgatgggattatgggctaatttgccaatggcgattggttgcgcgatttccttgacggcgtttaccgcattcagtctggtactcgggcaacaaattagcgttcctgtcgcactgggcgcggtatttctgatgggcgtcatcttcaccgccatttccgtaaccggtgtgcgtacctggatcttacgtaatttgccgatgggtatcgctcacggtacaggtatcggtatcgggctgtttctgctgctgattgctgctaacggtgtgggtatggttatcaaaaacccgattgaaggcttgccagtggcgctcggtgcgtttacctccttcccggtgatgatgagcttgctggggctggcggtcatcttcggcctggagaagtgtcgcgtacccggcgggatcttgttggtgattattgcaattagcatcatcggcttaatctttgacccagcggtgaaataccacggtctggtggcgatgccaagcctgactggcgaagatggtaagtctctgattttcagcctcgatattatgggtgcactccagccaactgtacttccgagtgtactggcattggtgatgaccgcagtgttcgacgctactggcaccatccgtgccgtcgccggtcaggcgaatttgttggataaagacaaccagatcatcaacggcggcaaagccctgaccagtgacagtgtaagtagtatattctccggcctggtgggcgcagcgcccgcagcggtttatatcgaaagtgcggcaggaaccgccgccgggggtaaaacaggtttaaccgcaaccgtagtgggggcgttattcctgttaattctgtttttaagtccgctgagttttttgatccctggttacgccactgcacccgctctgatgtacgtaggtttgctgatgttaagtaacgtcagcaagctggatttcaatgattttattgacgctatggctggcctggtgtgtgccgtgttcatcgttctgacttgtaatatcgttaccggtattatgctgggctttgtgacactggtcgtaggccgcgtctttgcacgcgaatggcaaaagctgaatattggtacggtgatcattactgccgcactggtcgcattttacgcgggtggttgggcaatctaatagattctccgcgcctttcagcgcggagatttctttcagagaggattctcaccgctggcaacaatacgctgctggcggactcgcctgagttctctttcagtaagcaactgcagcgcctgtgttgggcaagattcaacgcaggctggcccctcttcccgctgttcacagagatcgcatttcacaatttgttgtcgggtatcccccggcaagctctgaatggtgatcattccaaacgggcacgcactgacgcaactctgacagccaatacaacgggcagaattggtctgcaccacctgctcgcccatcgtcagcgcccccacggggcaagcgccaacacaaggggcgttttcacactgatggcacatcaccggcgcactgatgctgtccagtcgctgtaccttcagccggggtaaaaagacatcggcattcaactcctgttcactagggtgagcgaccacacaggctacttcacaagtacggcagccaatacagtcagccggattaacgataattaagcttttcatcagcttgccttcgtatcaaacagagttaacatatcgcgcgccgcctgccttcctgcggccattgcagtgacaaccagatccgcgccatgaactgcatcaccaccagcaaagacttttttcagatgcgtctgggtaggtaaatacccgacgtcaccggtttgaatcaggccccatttatcgagtttaattccgctgccctgcaaccacggcatggcatgcgcctggaaaccaaaggccataatcagaacatcggcgggcaattcaaactcactacccgctaccggacgaggacgacggcgaccatccggccccggctcacccatggcggtacgaatcaggcccaccgcagttaaacgcccatcttcgtcacaagcgatatattgcggttgaacattgaactgaaactcgacaccttcctcgcgcgcattaaccacctctttgcggctgcccggcatactgacttcatcacgacgatacgcgcaggtcacgctggcggcattgaggcggatggaagtccgcaaacaatccattgtcgtatcgccaccgcccaataccacgactcgcttaccttccacgtccgtcagcggatactcttcagactccggcaatcccatgagctggcgggtatgggcagtcaggaacggtagagcctgaatgacaccgggcgcatcttcatgcggcagatctgctcgcatcatcccgtaagtccccacgccgatgaaaactgcatcatattcagaagttaaatcgctaaaggtaatatcgcggccaatttcacagttaagatgaaagtcgattcccattgcggtgaatatctctcgccgctggcttaataccgttttatcgagtttgaaaggaggaatgccaaaagtcagcataccgccaatttctggatggcgatcaaagacatcgacctgaactcctgcgcgcgccagaatatcagcacaccctaaccctgcaggcccagcgccaatcaccgccactttttcgctacggggaacaactttgctgacatcgggacgccagcccatcgccagcgcggtatcggtgatgtagcgttccagattaccgatagagactgcgccgctgtgatctttcaaagtacatgcgccttcacaaagacggtcctgtggacataccctgccgcaaatttctggtaaggaactggtctggtggcaaagttctgccgcttcaataatctttccttcctgtaccagacggatgtaatccggaatagcgttatgcagcgggcaatgccagttgcagttagctttttcggcacaataaacacagcggtcactctcataagtcgcttgttgtggatccagcccgcaatatatttcgccaaagtgggttttccgttcactcgcactaattttatctgcgcctttacggctgttaacggggagcaacgctgcactgcgagatggctgagcgtcactactcgcttttcctgctgccgttttgcgctggcgggccacctttatctgctgcaaccctttatcgtccatcagtcgtaacgcctgtgttgggcaaacttcaatacaggcttgcgtgccggaactgcgctggttacaaaggtcgcatttctgcgcaatcgtatcgaccatctcaacgacgccaaaggggcaagcgattgcgcatcttttacaaccaatacatttttgctcgtccagttgtacgctatcggactggaaagtcagagcattaaccggacaagccgtaacgcaaggggcattgttgcagtgatggcaggccaccggattcgcagcctggcctttccctacaacgtggatacgcggtcgaaagtcactgtgactcagcggccagttttcttgattgtgtgccaccgcacaggcaatttcacaagcatgacagcctatacattccgcagcttcagcagcaataaacttattcatttgcatccctttcatttaatgagttatgtcttctcaaatttcgcgatgcaataaacgggcatatattaggtagcatgaccgttttaattataattttgcgactgagttcaaattattgcccctcaatctatgccgctttcattatttcaacattgccgatcaaaagagcgctatccagataaaaacgattaaatgcgagagtgcgacatgccagaatgattaatgaaatatcaatatgagaaaattacagataattccattgtcaggttctcttctcattttcgtggtttaaccacgattatgtgattgcctccgcaattcctgtctctaactccccttcctcgcaaaaactggcactccacgagcatgtgtttagacagtttcattaacgtaaacggttgctttttactctggcgggcgaaaggagaaacactgatgagcgccatagattcccaacttcccagttcttctgggcaagaccgcccaactgatgaggttgaccgcatattaagtccaggaaagctgatcatactcggtctgcaacacgtccttgtcatgtacgcaggtgcagtcgctgttcctcttatgattggtgaccgactgggcctcagtaaagaagctattgcgatgctcattagcagcgatctcttttgctgcgggatcgtcacattattgcaatgtatcggtatcggccgctttatggggatccgcctgccggtgattatgagcgtgacctttgctgctgtaacaccaatgatagccattgggatgaacccggatatcggcctgctggggatatttggtgccactatcgccgcgggttttatcaccacattattagcgccacttatcggtcgcttgatgcctttattcccgccactggttaccggtgtggttattacttctatcgggcttagcatcattcaggtgggtattgactgggccgccggaggtaaagggaatccgcaatatggtaatcccgtttatttaggtatctcctttgccgtcttaatttttatcttgctcattactcgctatgcgaaaggatttatgtccaacgtcgccgtattactggggattgtatttggctttttacttagctggatgatgaatgaagtcaatttatccgggctacatgatgctagttggtttgcgattgttacgccgatgagctttggtatgccgattttcgatcccgtttccattctgaccatgactgccgtgttaatcatcgtgtttatcgagagtatggggatgttcctggcactgggtgaaatagtcggtcgtaaactctctagccacgatattattcgcgggctgcgtgtcgatggcgtagggacaatgataggcggcacgtttaacagcttcccccacacgagtttttctcaaaacgttggcctggttagcgtgacgcgcgttcatagccgctgggtgtgtatttctagcggaattatattaatcctgtttggcatggtgccaaaaatggcggtgctggtagcctccattccgcaatttgtgctgggcggcgctggtctagtgatgttcggcatggtactggcgacagggattcgaattctgagccgctgtaactacaccaccaaccgttacaacctctatattgtggcgatcagtctcggcgttggcatgactccgacgctctctcacgatttcttttctaagttaccggccgtactgcaaccgctgctacatagcggcattatgctcgcaacccttagcgccgttgtgctgaacgtcttctttaatggctatcagcatcatgctgacctggtgaaggaatccgtctctgataaagatttaaaagtcaggacagtacgtatgtggcttctgatgcgcaagctgaagaaaaatgagcatggagaataatatgaattttttaatgcgcgctatattcagtctgttgttgctttttactctctctattcctgtcatttctgactgtgttgcaatggccattgaaagtcgcttcaaatatatgatgctacttttttaaatggtttttacctgtcggcatccgctcaaaacgggcggttgtcgataaacgctcacttggttaatcatttcactcttcaattatctataatgatgagtgatcagaattacatgtgagaaattatgcaaacggaacacgtcattttattgaatgcacagggagttcccacgggtacgctggaaaagtatgccgcacacacggcagacacccgcttacatctcgcgttctccagttggctgtttaatgccaaaggacaattattagttacccgccgcgcactgagcaaaaaagcatggcctggcgtgtggactaacagcgtttgtgggcacccacaactgggagaaagcaacgaagacgcagtgatccgccgttgccgttatgagcttggcgtggaaattacgcctcctgaatctatctatcctgactttcgctaccgcgccaccgatccgagtggcattgtggaaaatgaagtgtgtccggtatttgccgcacgcaccactagtgcgttacagatcaatgatgatgaagtgatggattatcaatggtgtgatttagcagatgtattacacggtattgatgccacgccgtgggcgttcagtccgtggatggtgatgcaggcgacaaatcgcgaagccagaaaacgattatctgcatttacccagcttaaataaaaaaaccccgacatttgccggggttgtgagcataacgtaatgcttattttaccggacgcatcgccgggaacagaataacgtcgcggatggtatggctgttggtgaacagcattaccatacggtcgataccaattcccagacctgctgtcggcggtaagccatgttccagtgcggtgacgtaatcttcatcgtagaacatcgcttcgtcgtcacctgcgtctttcgcggcaacctgatccaggaagcgttgcgcctgatcttccgcgtcattcagctcgctaaagccgttaccgatttcacgaccaccaatgaagaactcaaagcggtctgtgatttccgggttaacgtcgttacgacgcgccagcggagaaacttctgccggatattcagtaatgaaggtcggctgaatcagatgtgcttctgccacttcttcgaagatctcggtaacgatacggcccagaccccagctcttctcaacgtggatgccgatagattcagcaattgctttcgcagagtcgaagttgtccagatccgccatgtcggtttccgggcgatatttcttgatcgcttcacgcatggtcagtttttcgaacggtttaccgaagtccagcgtcacgtcgccgtaggtcacttccgtcttaccgagaatatcctgtgccagagtacggaacaggctttcggtcagctcgatcagatctttgtaatctgcgtaagccatgtagagttccatcatggtgaactctgggttatgacgtacggaaataccttcgttacggaagttacggttgatttcgaatacacgctcgaagccaccaaccaccagacgcttgaggtacagttccggcgcgatacgcaggtacatgtcgagatccagcgcgttatggtgggtgataaacggacgcgcagcggcaccgccagggatcacctgcatcatcggcgtttcaacttccataaagccgcggttcaccatgaactggcgaataccagagaggatctggctgcgcactttaaaggtgttgcgggattcatcgttggagatgagatcgagataacgctgacgatagcgcgcttcctgatcctgcaagccgtggaatttatccggcagcggacgcagtgctttggtcagcagacgcaactcggtgcagtggatagacagttcgccggttttggttttgaacagcttacctttcgcgccgaggatgtcgccgaggtcccattttttgaactgctcgttataaacgccttccgggagatcgtcacgggcaacgtacagctgaatgcgaccgccaacgtcctgcagggtaacgaaagacgctttacccataatacgacgggtcatcatgcggccagcaacggcgacttcgatgttcagcgcttccagttcttcgttctctttgccgtcgaattctgcgtgcaattggtcagaggtatgatcgcgacggaaatcgttcgggaaggcaatcccctgctcgcgcaggttcgccagcttctcacgacgcgttttcagttcattgttaagatcgactaccgcgtcagcgccctgtgcgtgttgttcagacatgttggttcctcataaccctgctttcaaacttgcttcgataaattgatccaggctgccgtccagcacggcctgcgtgttgcgggtttctaccccggtgcgcagatctttaatgcgggagtcatcaaggacataagaacgaatctggctgccccagccgatgtcggatttgttatcttccatcgcctgtttctcggcatttttcttctgcatctccagttcataaagcttcgctttcatctgcttcatggcctgatctttgttcttgtgctgggaacggtcgttctggcactgggtcacgatcccggtcgggatgtgggtaatacgcaccgcagattcggtacggttaacgtgctgaccgcccgcgccggacgtgcgataaacgtcaatgcgcagatccgccgggttgatttcgatatcaatatcatcatcaacttccggataaacaaacgcggagctgaagctcgtgtggcgacgaccgccggagtcaaacgggcttttacgcaccaggcggtgaacgccggtttctgtacgcagccagccgtaagcgtaatcgccggagattttgatcgtcacggatttaatacccgccacttcaccttcgctctcttcgatgatttcagttttgaaaccacggctttctgcccagcgcagatacatacgctcaagcatgctcgcccagtcctgtgcttccgtaccgccagaccccgcctgaatatcgaggtagcagtcggcgctgtcatattcgccagagaacatacggcggaactcaagctgcgccagtttttcttccagggcgtcgagttcagcaacggcttcgttaaaggtttcttcgtcgtcagcttctacagccagttccagcagaccagaaacatcttccagcccctgtttcatttggtcgagggtgtcgacaacggcttcgagggaggaacgctctttacccagcgcctgtgcgcgttcgggttcgttccagacatccggctgttccagctcggcgtttacttcttccagacgctctttcttggcgtcgtagtcaaagataccccctaagaacgtcggagcgttccgtgaggtcctgaatgcgattatttaccggattaatttcaaacatggtctgatttcttttattgagctagtcaaaatgcggtgataagagcgggattgtacccaatccacgctcttttttatagagaagatgacgttaaattggccagatattgtcgatgataatttgcaggctgcggttgccgcgaaactcgttgatatcgagcttataagccagttgcacttcgcgcacgccgttatccggccagagggcggtatcgacattaaaagcaataccatccagcagtggaccgccgccgaccggttcgaccatcaccttcaaatgacgttcgcccaccagccgctgttgcagcagacggaaatgaccgtcaaacagcggctccgggaacatctgcccccacgggccagcatcgcgcagcagctgcgccacttccatggtcatttcggccgggcttaacggaccgtcacttaccacttcgccttgcaataggctagggtccagccactcagtaaccagttcgccaaaccgttgttgaaagagtttgaatttatcctcttccaggctcaaacccgccgccatcgcatgaccgccaaacttcagcatcatgccagggtagagtgtgtctaatcgctccagcgcatcacgcatatgcagcccctgaatggagcgaccggaacctttcagcgtaccgtcacctgctggcgcaaacgcgataaccggacggtgaaaacgctctttgatgcggctagccagaataccgacaacgccctgatgccattcggggtgatacattgccagcccgccgggtagcgtgtcacggctgcgctccagtttctcgcacagggtcagggcttcaatttgcattccttgttcgatctcttttcgcgtctggtttagcgcatcgagttcatttgccagcacgcgcgcttcgccgatgttgtcgcacaacaacagcgccacaccgacggacatatcgtccagtcgtccggcagcattgagacgtggccccagcgcaaaacctaaatcgctggcggcgagtttttgtgcatcacggtttgccacttcaagcagcgctttaatccccggacggcactttccggctcggatgcgactcatcccctgccaggtcagaatgcgattattagcgtccagcggcacgacgtccgccactgtccccagcgcgaccagatccagcagttctgccaggttaggaattgcgatgttacgctcatcaaaccagccctgatcgcgcaaaaaggtgcgcagcgccagcatcagataaaacgccacacccacgcctgccagacttttgctcgggaaattacagtcgcgcaagttagggttaatgatcgcttccgctgcgggtaatgtgtcgcctggcaaatggtgatcggtaacaataaccgggatgcccaagctgcgagcgtgctcaacccccgcatgggaggaaataccgttatccaccgtgacaattaactgcgcgccacgggcatgggcctgatcgaccacttccgggcttaagccgtaaccgtcttcgaaacggtttggtaccaggtagtcgatattgctgcaaccaaggctgcgcatcgccagcacgcttagagccgtgctggtcgcgccgtcggcgtcgaaatcaccgaccacaataatccgcgttccttcgcgaaaagcgttgtaaaggatctcaacggccttttcgacgccgctcagttgctgccagggcagcatacctttaacactgcgttccagttcttgcgcactgcgtactccccggctggcgtataaacggcgcagcaagggaggcaattcagcgggcaagtctgccgtttcatcgacttcacggcgacgaagttgtatctgttgtttcacgcgaattatttaccgctggtcattttttggtgttcgtcgaggaattctttcatctctttcggcggctggtaacccggaacaagtgtgccattgctcagcacaactgccggagtaccgctaacgccaagctggacgccaagtgcgtaatggtcggcaatatccacgtcgcaactggctggtgcgacgcttttacctgccatcacatcatcaaacgctttgtttttatctttcgcacaccagatagctttcatttctttctctgcatcgctgtccagcccctggcgcgggaaagcaagataacgcacggtgatccccagcgcgttgtagtctgccatttgctcatgcagtttgtggcagtaaccacaggtaatatcagtaaacacggtgatgacgtgtttttcctgcggcgctttataaacgatcatctctttttcaagcgcattcaactgctttaacagcatcttattggtgacattgaccggagccgtgccactaacgtcatacattggcccctgaatgatatgtttaccatcatcggtgatgtacaacacgccgctgttagtcagaactgtcttcatgccagctacaggcgcgggctgaatatcgctgcttttgatgcccattttggctaacgtttgttgaattgccgcgtcatcagcctgagcaaagccactaaacgccgctaacaaagtaaacaacataaaacctttcttcataaatcttcccgttcttttcagacatcacgcccgcgggtgatgctgttgatgaagttgccgcagacgctcggtagcgacatgcgtataaatttgcgtggtggagagatcgctgtggcccagtagcatctgcaccacgcgtaaatccgcaccatgatttaataaatgagtggcaaaagcgtgacgcaacacatgcggactcagcttttcgctgtcgatacccgccagcacagcataatgtttaatacggtgccagaaggtctgtcgcgtcatctgctgcgcacgctggctgggaaacaacacgtcaatactcacaccattcagcagccacggacgcccatgttccagataggtttccagccagtaaaccgcctcttcacctaacggcaccagacgctctttgttgcctttaccaatgacccgtaccacgccctgacgcaggctgatatcactcattgtcagtccgaccagttcagagacacgcagcccggtagcatacaacacttcaagcatggctttatcgcgtagctccagtggctgatcgattaatggtgcctgtaataaacgttcgacctgcgcttcgcttaaatcttttggcaaacgctggggcaatttcggactagcgagatgcgcactgggatcgtcttcacgaaacttttcgcgataaagatactggaacaatcggcgcactgcactcagcaaacgcgcactgctggtggctttatacccgccctccagccgttctgccagtaatgcctgcaaatcgtcactttgcgccgtcgccagcgtcaacccgcggtgatgcaaccactccaccatcatactcagatcgcgacggtaagcgttcaacgtattttcagccagatttttttccagccacagagcatcaagaaactgctcgatgcgtgccagatcctgtttcacttgcgccccttatggtcactcatttgatccattatgccttattgtgccgtgactaaagcgattctgatacactagccgcaaaagccacagcagaatcgagaagcttacgttatgaatatgggtcttttttacggttccagcacctgttacaccgaaatggcggcagaaaaaatccgcgatattatcggcccagaactggtgaccttacataacctcaaggacgactccccgaaattaatggagcagtacgatgtgctcattctgggtatcccgacctgggattttggtgaaatccaggaagactgggaagccgtctgggatcagctcgacgacctgaaccttgaaggtaaaattgttgcgctgtatgggcttggcgatcaactgggatacggcgagtggttcctcgatgcgctcggtatgctgcatgacaaactcagcaccaaaggcgtgaagttcgtcggctactggccaacggaaggatatgaatttaccagcccgaaaccggtgattgctgacgggcaactgttcgtgggtctggcgctggatgaaactaaccagtatgaccttagcgacgagcgtattcagagctggtgcgagcaaatcctcaacgaaatggcagagcattacgcctgatctcactgacggcttagcgcatatgctttgccgtcatctttatctttgcgtctcttgttgcaacaaaatccgccgtaaatcccgccattcagcttcgtccatgctgtcggctgccagccataaatgttgccgtttaccgccatcagaacgtaaacgcagcatcatgccgctcttaatcatccacggtgctttgacgatgctccactcctgcccttgccaacgcaaacgcccgtccatcaacaagcgaatttccccctggcgagcattaatacgccgctggctgcgaacgcaatcaaacaccaccaggctaagtaacaccatccataacggggtgtaactgagtggccagggcatgagtaaaataacagcggcaaccagcccatgaatcagcaaggaaagccactgtgcgcgccaggagacgcgcaaatcagattgccacaggaccacgttcccggttccgtgtctggatgagtcggaccatcatttccagttctgcatcggccggtttaccgtgattcatcagccagttaaacaggtccggatcgtcacattccagcagacgaataaagatgcgtttttcgtcatcgcttaagctgtcgtactcatgttcgaaaaacggcatgatactaatatcgagttcgcgcataccacggcggcatgcccaatgaatgcgggctttgttgttaatgtccatcttcttcctgtctcacgaaaatccagtacccggctattgtaacgtgtttttcgccttcttttacgggaatatcagtaaacaccatcgcgatcgcgaaattaattcacaacaattcaatggcttcatttttttggaagtcgcctcgcagaaggcacagatcgcgtagtgaaagcacttgcattgcctcatagctcttttaccattagtcattaatacgccgttaagcaactcaggactctattatggcttttacaccttttcctccccgtcagcctacggcttctgcccgtttaccgctgacgctgatgacgcttgatgactgggcgcttgccaccattactggcgcggacagcgaaaaatatatgcagggtcaggtgacagcagatgtcagccagatggcagaagatcagcacctgctcgccgcccattgcgacgccaaaggtaaaatgtggagcaatttacgtctgttccgcgacggcgatggctttgcatggattgaacggcgcagcgtgcgtgaaccgcagctgactgaactgaaaaaatatgcggtattctctaaagtgaccatcgcgccagacgacgagcgtgtgctgcttggtgttgccggttttcaggcgcgcgccgcgctggcaaatctctttagcgaactgcctagcaaagaaaaacaggtagtcaaagaaggcgcgaccactttgctatggtttgaacacccggcagaacgtttcctgatcgtaaccgatgaagctactgctaatatgctgaccgataaactgcgcggtgaagcggaactgaacaatagccaacagtggctggcattaaacattgaagcgggtttcccggtgattgatgccgccaacagcgggcagtttatcccacaggcgaccaatctccaggcgctgggcggtatcagctttaagaaaggctgttataccggacaagagatggtggcgcgagcaaaattccgtggtgccaataaacgtgcgctctggttgctggcaggtagcgccagccgactgccggaagctggtgaagacttagagctgaaaatgggcgagaactggcgtcgtaccggtacggtactggctgcggtaaaactggaagatggtcaggtcgtggtacaggtcgtcatgaataacgatatggaaccggatagcatcttccgcgtacgcgacgatgcgaatacattgcatatcgagccgctgccgtatagcctcgaagagtaaatctctttatcgcatcaggcatttatcgcctgatgcgacgctggcgcgtcttatcatgtctgggatttgatgcctttatcacaacagggacgaggcccgtagatcggataaggcgttcacgccgaatccggcagttgtgctccgatgcctgatgcgacgctggcgcgtcttatcaggcctacaaaggcatacccattacgcctgcccaatatacaaatagatcgccagaaagtggcacacactaccgccgagcacgaagccgtgccagatggcatggttgtatggaatgcgtttgcagacgtagaaaatcaccccgaggctataaaccacgccgcctaccgccagtaaggtaacgctgcccgccgcgagcttaactgccatttcataaattaccaccaggctcagccagcccatcgccagataggtcaccagagataaaattttgaatcggtgcgcgatggtcagtttaaacagaatacccagcaatgccaggctccagataacaatcatcaacccgcgcgctaacggagaatccagccccaccagcaaaaacggcgtgtaggttccggcaatcaacaggtaaatagcgcaatggtcaaatttcttcagccacatttttgcccgttgatgaggaatggcgtgatagagcgtgctagcgaggaacagcaggatcatactgccgccatagaggctgtagctggttatcgctgtggcgctggcattaagatccaccgcctgaaccagtagcaacaccagcccaacgataccaaacaccaacccaatgccgtgactgacgctgttggctatttcctctgccagactatatccctgcttaatgaggggcttctgaaccataacttactccggagaaacgtacacgcacatgtatacctctccagcgtaactgagaatagttccagtgaacacctgttagctaaaataaattctgatttgagactaatctcctaaaaatcatgaaattaaatgcgaaatttcaactaacaggcgtgagttcaatttaaagacatttaaattcaatcacataaaattgtgtctgaccgggatagatgtcagcaatgacttttttcagttcagtcagggtcatattttcctgctctgcatgtttttcagtcagcgtatccagcgttacggtactggttgcggtgacttcaatcgtgcaaaaataaccgtcatcttcaaaacgtccgacacgaagcacatcacccgttttgaagtggctttcagactcgtcgcggatggtgatggttttacgcccagccagaatgtcatcctggaaacgttgaaaaaaagtgatgtcgtttggctgcatggtactatttcctgtaagaattgactcatctggagcctatgatagtgaaaaaactcaccttaccgaaagatttcttatggggcggcgcagttgccgctcatcaggtcgaaggcggctggaacaaaggcggaaaagggccgagcatttgtgacgttctgaccggtggcgcacacggcgtgccgcgcgaaatcaccaaagaagtcttgccaggaaaatactatccaaaccatgaagccgttgatttttatggtcactataaggaagacatcaagctatttgccgaaatgggcttcaaatgttttcgtacatccattgcctggacgcgcatttttccaaaaggcgatgaagctcagccaaacgaagaagggctgaagttctacgatgatatgttcgatgaactgctgaaatacaacatcgaaccggtgatcaccctctcccactttgaaatgccgctgcatctggtgcagcaatacggtagctggaccaaccgtaaagtggttgatttctttgtacgtttcgcggaagtggtatttgaacgctataagcacaaagtcaaatactggatgaccttcaacgaaattaacaaccagcgtaactggcgtgcaccgctgttcggttactgctgctccggcgtggtgtataccgagcatgaaaacccggaagagacgatgtatcaggtgctgcatcaccagtttgtcgccagcgccctggcggtgaaagctgcgcgtcgcattaacccggagatgaaagtcggctgtatgctggcgatggtgccgctctatccttactcctgtaacccggacgatgtgatgttcgctcaggagagcatgcgcgaacgctacgtctttaccgatgtgcagctacgcggctattacccgtcctatgtgttgaacgagtgggagcgtcgcggatttaacatcaaaatggaagacggcgatctggatgtgctgcgtgaaggcacctgcgattatcttggtttcagctattacatgaccaatgcagtgaaggccgaaggcggcaccggcgatgcgatctctggttttgaaggcagcgtaccaaacccgtatgttaaagcatctgactggggctggcagattgatccagtaggtctgcgctatgcactttgcgaactgtatgagcgttatcagaggccgctgtttattgtcgaaaacggttttggcgcttacgacaaagtggaagaagatggcagcatcaacgacgactaccgcattgactacctgcgcgcccatatcgaagagatgaaaaaagcggtgacttacgatggcgtggatctgatgggctacacaccgtggggctgcatcgactgcgtgagcttcaccaccgggcagtacagcaaacgctacggctttatctatgtgaataaacatgacgacggtactggcgatatgagccgtagtcgtaagaagagctttaactggtacaaagaggtgattgccagcaacggcgagaagctttaagtcgatgaagtaccggatgcaatacttgttgcatccggtcagacaacttccctgttttatttcccgcccgccaaatcgataaaacttcccgtgacgtaagaggctttatcacttagtagccagacaatggcctgcgcgacctcttctgcctgtccaccacgctgcatggggatgttgctcttaacgcgatcgacgcgtccaggctcgccgccgctggcgtgcatttcggtataaataaaccctggccgcacgcagttaacgcggatcccctgcgcggcgacttccaggcttagtccggtggttaacgtatcaatcgcccctttgcttgccgcgtaatcaacatattcccctgggctacccaaccgactggccacgctagagacattgacgatagcgccgccactgccaccatttttaagcgccatgcgttttaccgcctcgcggcagcagagaaaatatcccgtcacgttggtggaaagtactcggttgattcgctctgcggtaaggttttcaacggtgcactgggtaaacaagatcccggcgttattgaccagcgctgctagcggttcatcgtgctgatcgattgctgtaaacatcgcaacgacctggttttcgtcgctgatatccgcctggagcacgaatgctttgccaccggcttgcgttattaagttcatcacttcctgcgccgcgtggaggttttgctgataattaaccgccaccgtatacccttcttgcgccaacagtaatgcagttgcccgcccgatgccgcgactgccaccagtcacaagtgctatagccatttgtttttccgagaaaaattaattcgttgacgtatctttgagattgctaacaaactggctcaatcttcaatgttggcacgcttttccccctcgccctttcagggagagggccggggtgagggtaaatattcgcgccagtgccggcctgttcccctcaccctaaccctctccccaaaggggcgaggggactgtctgagcacttttgtactttgtcatctgactaaaaaggcgccgaagcgcctttagaaaatagtcgaatcagtgaattactggtattcgctaatcggtacgcaggagcagaacaggttacggtcgccgtaaacatcatccagacgtttcactgtcggccagtatttgtctgccacacctgccgggaataccgcaacttcacggctgtacggatgcgcccactcggcgaccagttcgctctgaatgtgcggcgcgttcaccagcgggttatcttccagcggccagacaccggctttcacctggtcaatttctgcgcggatagccagcatcgcgtcgataaagcgatccagttccactttgctttcagattcagtcggttcaaccatcagcgtacccgccaccgggaagctcatcgtcggcgcgtggaaaccgtagtcgatcaggcgcttggcaatatccagctcgctgatgccggtttcttctttcagcgggcgaatatcgagaatacattcgtgcgccacgcgaccgtcgcgaccggtatacagcaccgggaaggcatcctgcaggcggctggcaatatagttggcgttgaggattgccacctggcttgcttttttcagcccttctgcgcccatcatgcggatgtacatccagctgattggcaggatagaggcgctaccgaacggtgccgcagaaaccgcgccctgacgggttaacatgccttcgatttgcaccacgctatgacccggtacaaacggtgccaaatgcgctttcacgccgatcggtcccatacccggaccaccaccgccgtgcggaatgcagaaagttttatgtaggttaaggtgactaacgtccgcaccaataaagcccgggctggtgatgccaacctgggcgttcatgttcgcgccatcaaggtaaacctgaccgccgaactgatgcacgacttcacacacttcacggatcgtttcttcatacacgccgtgggtagaaggataagtcaccatgatacaggagaggttatcgcccgcctgttccgctttcgcgcgcagatcagtcagatcgatgttgccgtttttatcacacgccacaaccaccacctgcattcctgccatatgtgcagaagcggggttagttccgtgcgcagaagccgggatcaggcagatatcgcgatgcccttcgttgcggctttcatgataatgacgaatcgccagcaggcccgcgtattcgccctgtgcgccagagttcggctgcatacaaacggcgtcgtaaccggtcagtttcaccagccagtcagccagctgcgcaatcatctgctgataaccttcggcctgctccggcgggcagaacgggtgcagttcggcaaattccggccaggtgattgggatcatctcggcggcggcgttcagtttcatggtgcaggaacccagcgggatcatcgcctgattcagcgccagatctttacgctccaggctgtgcatatagcgcatcatttcggtttcgctgtggtagcgattaaacaccggatgggtgaggatttcgtcgtcgcgcagcatcgcaggctggatagagcggctgtcgtgagccacgtctttgtccagcgtgtcgatgtccaggccgtggttatcgcccagcagcacgttgaaaagctgcattacgttttcacgcgtggttgtttcatcaagggtgatcccaaccgcgttcagaatatcgctacgcaggttgatttcagccgcttcggcacgcgtcagtacgcccgctttgtcggccacttccacacacaaggtgtcgaaatagtgcgcatggcgcagtttcagacctttttgttgcaggcccgccgccaggatatcggtcagacggtgaatgcggttagcgatacgtttcaggccaaccgggccgtgataaacggcatacaggctggcgatgtttgccagcagtacctgggaagtacaaatgttggagttcgctttctcacggcggatatgttgctcgcgagtctgcatcgccatgcgcagcgcggtattgccagctgcatctttgcttacaccgataatacggcccggcatactgcgtttgtattcatctttcgccgcaaagaatgccgcgtgtgggccaccgtagcccatcggcacgccgaagcgttgcgcgctaccaaaaacaatatccgcgccctgtttacccggcgcagttaacagcaccagcgccataatatcggcggcaacgctgaccacaattttgcgacttttcagttcgctaataagcgcagtgtagtcgtgaatttcaccggtagtgcctacctgctgtaacagcacgccgaagacgtcctgatggtcgagcactttttgcgcgtcatcgacaatcacttcaaaaccaaaggtttcggcacgagtacggaccacatccagcgtttgcggatgcacatcggaagccacgaagaagcggttggcatttttcagtttgctgacgcgtttcgccatcgccattgcttcggcggcagcggtggcctcgtccagaagagaagcagaggccatatccagtccagtcaaatccagcgttacctgctggaagttgagcagtgcttcaaggcggccctgggagacttcaggttgatacggagtgtacgcggtataccagcccggattttccagcatgttacgcaggataaccggcggtagctgcacggcggtgtaacccatgccgatgtaagacgtgaagcgtttattgcgactggcaatagccttgagttctgccagtgcggcgtattcggtcgccggtgcgccaacctgcggtggtgtcgcaagttgaatatctttcggcacaatctggccggtcagcgcgtttaagctttgtgcaccaacggcattcagcatttcttgctgttgcgcggcgtccggtccgatatggcgttcaataaaagcgccgctgttttcaagctggcttaacgtctgtgtcatgagcgatggttcctgaaacgtgcagtgaattgtgaacctctctccttacgaagagagtgagggtgaggcataaattttcctcaccctgatcctctcccgcagaagaggaataaagccgttactcgtcttctaacaatgcttcgtatgcggtcgcatccagcagactttccagttcgctttcatcgctggctttgattttaaagatccagccgcctgcatacggttcgctgttcaccagttccggggaatcgctcagtgcgtcgtttaccgccacgatttcaccgcttactggcgcataaatgtcactcgccgcttttacgctttcggcaaccgcgcagtcatcgcccgcgctaaccgttgcgcccacttccggcaggtcaacaaacaccatatcgcctaacagctcctgagcatgttcggtaataccaacggtgtaagtgccgtcggcttctttacgcagccattcgtgttctttgctgtatttcagttctgctggtacgttgctcatcaatcaatctccaaaaaagtaaatcacgcgacggctttgccgttacgcacaaaaacaggttttgtcactttaaccggcatttcacggttgcgaatttgcacaatcgccgtttcgccaataccttccggcacgcgcgccagcgcaatgctgtaacccagcgtcggggagaaagtaccgctggtgataatgccttcatgctggttgccctgcgcatcggtaaagcgtaccggcagttcattacgcagcacgcctttttcggtcatcaccagaccaaccagtttttctgtaccatgctcacgctgcacttccagggcttcacgaccgataaagtcacgatctgccggttcccaggcgatggtccagcccatgttggcggctaaaggagagatggtttcgtccatctcctgaccataaagattcatgcccgcttccagacgcagcgtgtcacgcgcgcccaagccacatggcttaacacccgcttccaccagcgcacgccagaaatcggccgctttttcattgggcagcgcaatttcatagcccgcttcaccggtataaccagtggtggcaataaacagatcgcccgcctgcacgccaaagaacggtttcatcccttccaccgcctgacgctgggcgtcattaaacagtgtggcagcttttgcctgcgcattcggcccttgcacggcaatcatggaaaggtcatcacgaacggtaatttcgatgccgaaaggttcagcgtgttgggtaatccaggagaggtctttttcgcgggtggcggagttaacaacgaggcggaagaaatcttcagtaaagtagtagacgatgaggtcatctatcacaccgccagaggcattcaacatcccgctgtaaagggctttgccgcttttggtgagcttcgccacatcgttcgccagcagataacgcagaaactcccgggtgcggctgccgcgaagatcgacgatggtcatatgactcacatcaaacattccggcatcggtacgtaccgcatgatgttcgtcgatttggctaccgtaatgcagcggcatcatccagccgtggaaatccaccatgcgagcgccgcaaagcgtgtgttgttcgtacaaaggagtctgttgtgccatcttgtcctcattgaataagcggggctgacaactttttcatggtgaaattatcaccacgaaacccagcatcggagccactcccggtccccaacgcaatcgttctcttttgcctgaacttaccaccgaaacagactgttaaccataaggtaaaattgatcatcacattagcttatggttaaaaaatgcaaaaatcgcgacagaataaaaaaccaaaaaatacaccagtttctatacaaagatgatgtgatgagaaagtcaatttgaataagacaatattaagagctaaaaaaatgtcaaaaaacactaaatcaaaaaataatggcattagaaaatataatgcgaaaacggaggtgaaattagtttatttcaaatgaggaaaatctcccggcgaaaaaaccgggagatgaaagtgtgatgggtatcaaataaacaacagaggagaaatttttaacgcagccattcaggcaaatcgtttaatcccattgcctggcggataagttgcggcttaacgccaggaagcgtgtcggccagtttcaaaccaatatcacgcagcagttttttcgccggattggtaccggaaaacagatcgcggaatccctgcataccagccagcatcaacgccgcactgtgcttgcggctacgctcatagcgacgcagataaatgtactgcccgatgtctttcccctgacgatgcaaccgtttcagttcggcaatcagctctgcagcatccataaagccgagatttaccccctgccccgccagcgggtgaatggtatgtgcggcgtcgcccaccagcgccagacggtggctggcaaactggcgcgcataacgccccgtcagtgggaacacctgacgcgcgctctcaaccttgcataagcccaggcgattatcaaaagcgatatttaacgcgcgattaaattcgtcttcacttgcctgctgcatccgctgcgcttcctctgggctcagactccagacaatgctgcaaagatgcggatcgctaagcggtaaaaaggccagaatgccttcgccatggaaaacctgccgcgccaccgcatcatgcggttcttccgtgcgaatggtcgctaccagcgcgtgatgctgataatcccagaaagtcagcggaatatcggctttgttgcgcaaccaggaattagcgccgtccgcgccaatcaccagacgcgccgttaacatgctgccatctttcagcgtcaggaaggtttcattttctccccaggcgacctgctgtaattctgcgggggctaacagagtgatatcactgctctgatgcgctttgttccacagcgcgtagtgaatcacactattttcaacgatatgcccaagatggctatagcccatgctttgatcgtcaaagctaatgtgaccaaagctgtctttgtcccacacttccataccgtgataacagctggccctacgagagagaatgtcctgccagacgccaagacgggtgagtaatttttcgctggcggcattgatagcgctaacgcgcagttgtggtggtgcattcgccgccagaggttcctgtacgcgctgctccagtacggcaacgcgtaagccgctcccctgtaagccacaggcaaccgccagccccaccatgccgccgccaacaatggctacatcaacactttgcattgtttattccttaaaaccgccttcaacgcgccacccaaccgagggtgcgctgcgccagcacatcgcgtgccggggtgaataattccatcgtcatcagcccgatgttgcgcccgacaaccagcggtgcccaacggttggcaaaaagatgtacaaggctgtccgtgacgccaatggttgcttcgcgatcgctctgtcgacgctgctgataacggcacaatacgccgtaatcccccatgtcttctccgcgctcctgcgcctgagtcagggtttccgcaagactcatcacatctcgcataccgaggttaaacccttgcccggcaatcgggtgcagagtttgcgccgcattgcccaccagcacggtacgatgggtaatagatctggcggcgtgggttaacgccagcggataagcactgcgtttaccagcgtgggtaattttcccaagtcgccagccaaaggcgctctggagttcacggcaaaacttctcgtcactccagctcaacacctcttcgcgccgttccagtggatgacaccagaccaggctacagcgtccgtcagacatcggcaacatcgccagcgggccatgttgcgtaaagcgttcaaaagcgcgcccttcatgcgcaacggaagtagcaacgttggcaatcacggccagttgttcgtaaggctcctgctgccagtcaacgccgcacgcggtggctaacgcactatgggtgccatcagctgctaccagcacgcggcccgtcagcgtctcgccactctccagcgtcacttcaacgtgactctgagtacgggcaacgttagccacgcgatcagggcaatgcagcgttacgccaggtgctttacgcagcaatgcaaacagccgttgcccgacattgtgcaattcgacaacctgtcccagcgccgccagttggtaatcttctgcggcgagggtgacaaatccagcgtgaccacgatcgctgacatgcacggtggtgatggcagttgcgcaatccgccagagattgccagacgccgatgcgcgccagttgctgacaggtacccgccgccagcgctatcgctcgtccatcaaagcccggatgagcatgactctctggcgcagtcgcttcaatcaaatgtaccggcagcgccccgtgacttaaccgggaaatagccagcgccagcgtcgcgcccgccatgccgccaccgacgatgattacgctcattgctttctcgcagcaaccatcaacgcttcgatttcttccggctttttcaccacgctggcggtgaggttttcgttaccggtttcggtaatcacaatgtcgtcttcaatacgaatgccgataccgcgatattgttctggcacttctgcatccggcgcaatatacagccctggctctacggtcagtaccatgcccggttccagaatgcggctgcgatcctgaccataaacacccacgtcatggacatccagtcctaaccagtggctaaggccatgcataaagaaaggacgatgggcgttctgagcgatcagttcatcaacatcacctttcaggatgccgagttttaccaggccgctaaccatgatgcgcaccacttcaccagtgacttccagaatggaagttcccggacgatacaggcgcaggctggtttcgagagactccagcacaatgtcgtagatttcacgctgggcctgggtgaatttgccgttgaccgggaaggtgcgggtaatatcgccagcgtaacctttgtattcacaacccgcgtcaatcaacaccaggtcgccgtcgcgcatttcacactcgttttcggtgtagtgcagaatgcagccgttttcaccgctgccgacaatggtgttataggacggatagcgcgcaccgtggcggttaaattcgtggtgaatttcgccttccagatggtactcgaacattcccggacggcatttttccatcgcccgtgtatgtgccatggcggtgatttctcccgcgcggcggagtacggcaatctcttctgggcttttgaacaggcgcatttcatgaacaacaggacgccagtcgatcatcgttgccggtgcggtgagattttgccggctacctttacgcagtttttccagcgcactgttcacgattacatcagcatatgcatattcgccctgggcatggtaaaccacatccaggccgttaagtagttgataaagttgctgattgatttcgctgaatgccagtgcgcggtcaacgcccagtttctctggcgcggcatcctggcctaagcgacggccaaaccagatctccgccgtcaggtcgcgaacgcggttaaacagaacgctgtggttatgagtgtcatcgcttttaatcagcaccagcaccgcttccggttcgttaaagccggtgaagtaccagaagtcactgttctgacgataggggtattcgctgtcggcgctacgtgttacttctggtgcagcaaaaatcagcgcggcgctgccgggttgcatttgctccaccagggcctgacggcgacgctgaaactcttgccgggatatctcactcataacactctccttacgttttttgtttttagtgtagagtcggtttttgtacttctggcgcggtcggttgcggatgagtaaaggtgtcgtggcataacagcgcggcaacacgaacgtattcgatgatctcttcaaggctcatttcaagctcttcctgatcttcgtcttcgtcgtaacccagttgcgcaatgttacgcagatcgtcgatagcttcaccggtttcgccggtcactttatccagcttcggttgcgtaacgccaagaccaagcaggaagtgattgacccaacctgccaatgcatcagcccgatcgaaaacgctgacatcatcgccatcaggcagataaagctgaaaaaggaagccgtcatcctgcagggcatcgctggtggcagagtgcattttacgcagtgcctgtgccagctcatgaccgaaagccatgccttcgttcgtcaggtcgtgaagtagcggtagccaactgctgtcatcgttaccgccacatatcatcccgctgattaaaccatgcatctcagctggggtcagacccgtcccttgttggttcagatactggttcatttcgttgtaaccaggcatttcgttctgtatagacataagcattcgtcgtcaaagggaggaatattcatgatatgctaccactttgggccctggtggaccagaaaagggcttgtctcttctcatcagggtagctatagtgtcgccccttcgcagaccatgggtctaaagacgaaggcagcgcagtcaatcagcaggaaggtggcatgtctgcacaacccgtcgatatccaaatttttggccgtagtctgcgtgtgaactgcccgcctgaccaaagggatgcgttgaatcaggcagcggacgatctgaaccaacggttgcaagatctgaaagaacgcactagagtcacaaatactgaacagttggtcttcattgccgcattgaatatcagctatgagttagcgcaagaaaaagcaaagactcgtgactacgcggcaagtatggaacagcgtattcggatgctgcagcagaccatagaacaagcgttacttgaacaaggtcgcatcaccgaaaaaactaaccaaaactttgaatgacacttttcggtttactgtggtagagtaaccgtgaagacaaaatttctctgagatgttcgcaagcgggccagtcccctgagccgatatttcataccacaagaatgtggcgctccgcggttggtgagcatgctcggtccgtccgagaagccttaaaactgcgacgacacattcaccttgaaccaagggttcaagggttacagcctgcggcggcatctcggagattcccttcttatctggcaccagccatgacgcaactaccagaactcccactgacattatcccgacaagaaatccgcaaaatgattcggcaacgtcgtcgtgcgttaacgccggaacaacagcaggaaatgggtcaacaagccgctacccggatgatgacttatcccccggtggtgatggcacatacggtcgctgtattcctctcttttgatggcgaactcgacacccagccactcatagaacaactctggcgcgccggtaagcgcgtatatcttccagttttgcatccctttagtgccggtaatttgctgttcctgaattaccatccgcaaagcgaactggtgatgaacaggttgaagatccatgagccaaaattggatgtgcgtgacgtgctacccctttcccgattagacgtgctgatcacaccgctggtcgcctttgatgagtacggtcagcgcctgggaatgggcggtggtttttatgatcggaccttacaaaactggcagcactataaaacgcaaccggtgggttatgcgcatgattgtcagttggtggaaaaactccccgttgaagagtgggatatccctcttcctgcggtggttacaccgagcaaagtctgggagtggtaagggcgatacacccgcatcgccctgattgacatcgttgattctttgacctaatttagtgagtaagggtaagggaggattgctcctcccctgagactgactgttaataagcgctgaaacttatgagtaacagtacaatcagtatgatgacaagtcgcatcataacccttctccttcaagccctcgcttcggtgagggctttaccgttacagccccatgctgccctgccatcgtaaatccccattaaataaacacaacgcattgatctgactttgatttattttctggagcagactcgcaaagtagaatgcgcaacgcggcaacggtgtggagaagggataaaaaaacgggcaagtcagtgacctgcccgttgattttcagagaaggggaattagtacagcagacgggcgcgaatggtacccggaatagctttcattgcctgcagcgctttttcggcaacgtcttcgtcggcttcaatatcaataaccacataacccatctgggcggaagtttgcagatattgcgcggcgatgttgacgccctgctcggcgaagattttgttcagcgcagttagcacgcccggacggttttcgtggatgtgcatcagacgacgcccaccgtgcagtggcaggctgacttccgggaagttcaccgcagagagcgtactgccattgtcagaatacttgatcaatttacccgcaacttccaggccgatattctcctgcgcttcctgagtgctaccgccaatgtgtggcgtcagaaggacgttgtcgaattcacacagcggagaggtaaatggatcgctattggtcgccggttccgtcgggaatacgtcgattgccgcccccgccagatgtttgctcgccagcgcatcacacagcgccggaatatccaccacagtaccgcggctagcattaatcagcaggctgccgggcttcattagactaatttctttcgcgcccatcatatttttggtggacggattctctggtacatgcagactcaccacatcgctcatattcagcaggtcagaaagatgctgtacctgagtggcgttgcccagcggcagtttattttcaatatcataaaagtaaacatacattcccaggctttcagccagaatgcccaattgcgtaccaatatgaccgtagccgatgatacccagctttttgccgcgcgcttcaaaagaacccgccgccagtttgttccacacgccacggtgcgctttagcattggcttccggcacgccgcgcaatagcagcagcagttcgccaatcaccagctccgcaacagagcgcgtattactgaacggtgcgttaaataccgggatcccgcgctttgccgccgcatccagatcaacctggtttgttccgatacagaaacagccaatagcgaccagtttttctgcggcgttgatcacgtcttcagtcagatgggtacgggatcgcaggccgatgaagtgggcatcgcggatggattcttttaattgttcatcatccagcgcgcctttgtgaaattcgatgttggtgtaaccagctgcacgaaggctttccagcgccttttggtgcacgccttctaccagcagaaacttaatcttgtctttctccaggcttacctttgccatttacccaatcctgtcttttgaaatgttgtgtgcggatttgcatccgcctttcaacatatcaaaaaataatattgcggcaatatgaacgtttgcgtcgcgatgttgaggaaatatcacgcaaaggtaattcttggatgaatatgctggtttagaggatttatttagagcaatcgacaattgcctggtaaaagcgtgacacatgtcaccaaatttaatgaagagaatttttttaacgggggaggttcccccgtcagatcatttcacaatggttttgacaccgtcaggtgtgccaatcagcgcaacgtccgcgccacggttagcaaacaagccaacagtcaccacgccaggaatcgcatttatggcgttttccatcgctatcgggtcaaggatttccatgccgtggacgtcgaggatcacgttgccattatcggtcaccacgccctgacggtattccggacgaccgcccagtttcaccagctgacgcgccactgcactacgtgccatcgggataacttctactggcagcgggaatttacccagaatatcaacctgcttggaagcgtctgcaatacagataaatttttctgcaacgctagcaatgattttttcacgggtcagcgccgcgccgccgcctttgatcatttgcatgtggccgttgatttcatctgcgccatcaacgtagatgccaaggctgtcgacttcgttgagatcaaaaacgtgaatgccgaggcttttcagtttttcagtggaagcatcactactggaaacggccccttcaatctggcctttcattgtaccgagcgcgtcaataaagtgtgcggcggtggaacctgtacctacaccaacaatggtgccgggctgaacatactgaagtgccgcccatcctactgcttttttcaattcatcctgcgtcatgatcgtttcgcctgtggtatgaaatttcacacgcattatatacaaaaaaagcgattcagaccccgttggcaagccgcgtggttaactcatccataaaatatcgcgcaatggcaggcatcccctttcgccccgcaaataaagcatacaacggtctgggtatgccgctccacggtgcaaacaggcgcaccagttcaccgttcgcaagcccctgtttacaggcaaattgaggcaataacgccacgccattcaacacaaccagggcgcgaactcgctgagcgaaatgcattagcgcaaatccctgatcttttaagctgcgcttttaaccacggatacaaatgttacccgccgacggcttcggtatatgcaacctgacacaaaattgtgtcatagtgcaggaaaaagcatttaccaggagcagacaacagcaatgaaacgcccggactacagaacattacaggcactggatgcggtgatacgtgaacgaggatttgagcgcgcggcacaaaagctgtgcattacacaaagtgccgtcagtcagcgcattaagcaactggaaaatatgttcgggcagccgctgttggtgcgtaccgtaccgccgcgcccgacggaacaagggcaaaaactgctggcactgctgcgccaggtggagttgctggaagaagagtggctgggcgatgaacaaaccggtagcactccgctgctgcttagtctggcggtcaacgccgacagtctggcgacgtggttgcttcctgcactggctcctgtgttggctgatagccctatccgcctcaacttgcaggtagaagatgaaacccgcactcaggaacgtctgcgccgcggcgaagtggtcggcgcggtgagtattcaacatcaggcgctgccgagttgtcttgtcgataaacttggtgcgctcgactatctgttcgtcagcagtaaaccctttgccgaaaaatatttccctaacggcgtaacgcgtagcgcattactgaaagcgccagtggtcgcgtttgaccatcttgacgatatgcaccaggcctttttgcagcaaaacttcgatctgcctccaggcagcgtgccctgccatatcgttaattctagtgaagcgttcgtacaacttgctcgccagggcaccacctgctgtatgatcccgcacctgcaaatcgagaaagagctggccagcggtgaactgattgacttaacgcctgggctatttcaacgacggatgctctactggcaccgctttgctcctgaaagccgcatgatgcgtaaagtcactgatgcgttactcgattatggtcacaaagtccttcgtcaggattaatccatcaaataatgcctgatagcacatatcaggcgttgtcctcacttctttttgtattccttgaatcacatcacaaaatagacaaatctcaggcggcaaaaaacgacgtctgaatgcattttttttgctggcgacaaacccacgtaaaaagctcaccgtaggcgcaaataccctcattttgattgcgttttacggagcaaataatgtctaacgtgcaggagtggcaacagcttgccaacaaggaattgagccgtcgggagaaaactgtcgacagcctggttcatcaaaccgcggaagggatcgccatcaagccgctgtataccgaagccgatctcgataatctggaggtgacaggtacccttcctggtttgccgccctacgttcgtggcccgcgtgccactatgtataccgcccaaccgtggaccatccgtcagtatgctggttttagtacagcaaaagagtccaacgctttttatcgccgtaacctggccgccgggcaaaaaggtctttccgttgcgtttgaccttgccacccaccgtggctacgactccgataacccgcgcgtggcgggcgacgtcggcaaagcgggcgtcgctatcgacaccgtggaagatatgaaagtcctgttcgaccagatcccgctggataaaatgagcgttagcatgaccatgaatggcgcagtgctaccagtactggcgttttatatcgtcgccgcagaagagcaaggtgttacacctgataaactgaccggcaccattcaaaacgatattctcaaagagtacctctgccgcaacacctatatttacccaccaaaaccgagtatgcgcattatcgccgacatcatcgcctggtgttccggcaacatgccgcgatttaataccatcagtatcagcggttaccacatgggtgaagcgggtgccaactgcgtgcagcaggtagcatttacgctcgctgatgggattgagtacatcaaagcagcaatctctgccggactgaaaattgatgacttcgctcctcgcctgagcttcttcttcggcatcggcatggatctgtttatgaacgtcgccatgttgcgtgcggcacgttatttatggagcgaagcggtcagtggatttggcgcacaggacccgaaaagtctggcgctgcgtacccactgccagaccagtggctggagcctgactgaacaggatccgtataacaacgttatccgcaccaccattgaagcgctggctgcgacgctgggcggtactcagagtctgcataccaacgcctttgacgaagcgcttggtttgcctaccgatttcagtgcacgcattgcccgcaacacccagatcatcatccaggaagaaagtgaactctgccgcaccgtcgatccactggccggatcctattacattgagagcctgaccgatcaaatcgtcaaacaagccagagctattatccaacagatcgacgaagccggtggcatggcgaaagcgatcgaagcaggtctgccaaaacgaatgatcgaagaggccagtgcgcgcgaacagagcctgatcgaccagggcaagcgtgtcatcgttggtgtcaacaagtacaaactggatcacgaagacgaaaccgatgtacttgagatcgacaacgtgatggtgcgtaacgagcaaattgctagcctggaacgcattcgcgccacccgtgatgatgccgccgtaaccgccgcgttgaacgccctgactcacgccgcacagcataacgaaaacctgctggctgccgctgttaatgccgctcgcgttcgcgccaccctgggtgaaatttccgatgcgctggaagtcgctttcgaccgttatctggtgccaagccagtgtgttaccggcgtgattgcgcaaagctatcatcagtctgagaaaagcgcctccgagttcgatgccattgttgcgcaaacggagcagttccttgccgacaatggtcgtcgcccgcgcattctgatcgctaagatgggccaggatggacacgatcgcggcgcgaaagtgatcgccagcgcctattccgatctcggtttcgacgtagatttaagcccgatgttctctacacctgaagagatcgcccgcctggccgtagaaaacgacgttcacgtagtgggcgcatccagtctggctgccggtcataaaacgctgatcccggaactggtcgaagcgctgaaaaaatggggacgcgaagatatctgcgtggtcgcgggtggcgtcattccgccgcaggattacgccttcctgcaagagcgcggcgtggcggcgatttatggtccaggtacacctatgctcgacagtgtgcgcgacgtactgaatctgataagccagcatcatgattaatgaagccacgctggcagaaagtattcgccgcttacgtcagggtgagcgtgccacactcgcccaggccatgacgctggtggaaagccgtcacccgcgtcatcaggcactaagtacgcagctgcttgatgccattatgccgtactgcggtaacaccctgcgactgggcgttaccggcacccccggcgcggggaaaagtacctttcttgaggcctttggcatgttgttgattcgagagggattaaaggtcgcggttattgcggtcgatcccagcagcccggtcactggcggtagcattctcggggataaaacccgcatgaatgacctggcgcgtgccgaagcggcgtttattcgcccggtaccatcctccggtcatctgggcggtgccagtcagcgagcgcgggaattaatgctgttatgcgaagcagcgggttatgacgtagtgattgtcgaaacggttggcgtcgggcagagcgaaacagaagtcgcccgcatggtggactgttttatcagcttgcaaattgccggtggcggcgatgatctgcagggcattaaaaaagggctgatggaagtggctgatctgatcgttatcaacaaagacgatggcgataaccataccaatgtcgccattgcccggcatatgtacgagagtgccctgcatattctgcgacgtaaatacgacgaatggcagccacgggttctgacttgtagcgcactggaaaaacgtggaatcgatgagatctggcacgccatcatcgacttcaaaaccgcgctaactgccagtggtcgtttacaacaagtgcggcaacaacaaagcgtggaatggctgcgtaagcagaccgaagaagaagtactgaatcacctgttcgcgaatgaagatttcgatcgctattaccgccagacgcttttagcggtcaaaaacaatacgctcagtccgcgcaccggcctgcggcagctcagtgaatttatccagacgcaatattttgattaaaggaatttttatgtcttatcagtatgttaacgttgtcactatcaacaaagtggcggtcattgagtttaactatggccgaaaacttaatgccttaagtaaagtctttattgatgatcttatgcaggcgttaagcgatctcaaccggccggaaattcgctgtatcattttgcgcgcaccgagtggatccaaagtcttctccgcaggtcacgatattcacgaactgccgtctggcggtcgcgatccgctctcctatgatgatccattgcgtcaaatcacccgcatgatccaaaaattcccgaaaccgatcattagcatggtggaaggtagtgtttggggtggcgcatttgaaatgatcatgagttccgatctgatcatcgccgccagtaccagtaccttcagtatgacgcctgtaaacctcggcgtcccgtataacctggtcggcattcacaacctgacccgcgacgcgggcttccacattgtcaaagagctgatttttaccgctagcccaatcaccgcccagcgcgcgctggctgtcggcatcctcaaccatgttgtggaagtggaagaactggaagatttcaccttacaaatggcgcaccacatctctgagaaagcgccgttagccattgccgttatcaaagaagagctgcgtgtactgggcgaagcacacaccatgaactccgatgaatttgaacgtattcaggggatgcgccgcgcggtgtatgacagcgaagattaccaggaagggatgaacgctttcctcgaaaaacgtaaacctaatttcgttggtcattaatccctgcgaacgaaggagtaaaaatggaaactcagtggacaaggatgaccgccaatgaagcggcagaaattatccagcataacgacatggtggcatttagcggctttaccccggcgggtagcccgaaagccctacccaccgcgattgcccgcagagctaacgaacagcatgaggccaaaaagccgtatcaaattcgccttctgacgggtgcgagtatcagcgccgccgctgacgatgtactttctgacgccgatgctgtttcctggcgtgcgccatatcaaacaagctccggtttacgtaaaaagatcaatcagggcgcggtgagtttcgttgacctgcatttgagcgaagtggcgcaaatggtcaattacggtttcttcggcgacattgatgttgccgtcattgaagcaagcgcactggcaccggatggtcgagtctggttaaccagcgggatcggtaatgcgccgacctggctgctgcgggcgaagaaagtgatcattgaactcaatcactatcacgatccgcgcgttgcagaactggcggatattgtgattcctggcgcgccaccgcggcgcaatagcgtgagcatcttccatgcaatggatcgcgtcggtacccgctatgtgcaaatcgatccgaaaaagattgtcgccgtcgtggaaaccaacttgcccgacgccggtaatatgctggataagcaaaatcccatgtgccagcagattgccgataacgtggtcacgttcttattgcaggaaatggcgcatgggcgtattccgccggaatttctgccgctgcaaagtggcgtgggcaatatcaataatgcggtaatggcgcgtctgggggaaaacccggtaattcctccgtttatgatgtatagcgaagtgctacaggaaagcgtggtgcatttactggaaaccggcaaaatcagcggggccagcgcctccagcctgacaatcagcgccgattccctgcgcaagatttacgacaatatggattactttgccagccgcattgtgttgcgtccgcaggagatttccaataacccggaaatcatccgtcgtctgggcgtcatcgctctgaacgtcggcctggagtttgatatttacgggcatgccaacagtacacacgtagccggggtcgatctgatgaacggcatcggcggcagcggtgattttgaacgcaacgcgtatctgagcatctttatggccccgagcattgctaaagaaggcaagatcagtaccgtcgtgccaatgtgcagccatgttgatcacagcgaacacagcgtcaaagtgatcatcaccgaacaagggatcgccgatctgcgcggtctttccccgcttcaacgcgcccgcactatcattgataattgtgcacatcctatgtatcgggattatctgcatcgctatctggaaaatgcgcctggcggacatattcaccacgatcttagccacgtcttcgacttacaccgtaatttaattgcaaccggcagcatgctgggttaatgactcgtcccgtcacgatcttcagcaatatgctgaagcatcgtggcggtataacgatgatttctgatactataaagatattcctgcatatacatcggcctgtgcggtgcatcaaaatatttcagcgttgccggattcaccagtcgccaggcaaaatgcgggatcaccgtcagaaaatgtccgcgctccacggcgctgattttggccataaaactgtagggacgataaataatggttggattgatcccacaaggtcgcatattcgcatcaatcattgcttcgaagttggcccggttctgaaagcgcatttgtagccagggcagctcctgaagcagctcttgctcttgtcgctcttcataacggcgagaaacgagaaagcctaatcgcagcggtggtagttcactgatagtcaggttttccagttcctgaactcgtgcagatacatgctgtggggagataataaaatctaactggcggtcaaaaagattatcgataacgccattttcgctgaactcaactggctgggcggtcacgccttcatacttatctccgagactaatcaactgatcgaaaataattgtcggataagtattatctatgccaatcacaatttctcgactacgacgcccactgttatggatttcattatcaatcgcagaaagccgttgataaaccgggaacagtttttgatacagttcctgtccggctttattgaggctgatattattatctttgcgggtaaatagcgtatagccaatttgttcttccagcgcggcaatgcttttaccaaatgggctagccgtcatatggattttttctgccgcccgggcaatattattggtttgcgctaataaaatgaaattgcgcatctttttgctaataaaaatgtccatccccctcccccgcatccttgtccgcttaaccgtttcagtcagcctatccttgatgaaaccgcgagcaaagataggtgattacgtcatggttttacagaaaattacagaaaaaggaggcaatatcgggtaaaggcattagcccgacgaatacgtcgggctacaaatattattgtgctgcaggtgttttagcgggttgttgatccacaggttctaactggaagaccacatcgacctgatcatcaaactgaatagcggcctgctcgtaagtttcctgggcggacaccggcgcggcatcggctttcatcatccgcaccattgggctgggctgatagttggaaacatggtagcgcacgctatataccggccccagtttacgatgaaagccgttcgccagttcctgcgcctgatgaatcgcgttatcaatcgctgccttacgcgctttgtctttataggcatccggctgcgccacgcccaggctcacagaacgaatttcgttaagacccgccttcagcgcgccatccagcaaggaattcagtttgtctaactgacggagcgtgacttccaccgttctcacagcgcggtagcctttaaggatacttttaccatcctgataatcataatctggctgggtgcgtaagttcgcactgctgatatcttttttcgcgatctgattgagttcaaggaaggaaatgtattgtgcgacgcgctcatctgcctgtttcttggcagtagcggcatccttcgcggccacgttaacttcaatcgcaagagtggcaatgtctggcaccgcatccacgcttgccgtaccggaggtgacaatatgcggtccatccggcaattcgttagcctgcgctgccatcccgctaatacccattaatgccgccagggcgataactttgaacttcacgttagtctctccgtgttaattgacttgcccaaaattcaggacctctggaggcaagcttagcgcctctgttttatttttccatcagatagcgcttaactgaacaaggcttgtgcatgagcaataccgtctctcgccagctgcaaggcaataaaccacataacacatcccacaaccagattgataatgcgctgtgcttttgccgtgcgcagacgcggtgccagccaggctgcgagaagagccagaccaaagaaccacaggaaagaggcgctaattgtcccgagtgcaaaccagcgttttggttccacatcaagttgcccgccaaggctgcccagtacaacaaaagtatccaggtaaacatgcggattcagccaggtcactgccaacatggtggcgataattttccatctgccttgcttcatgacttcggcgctggctaactcaatattactgctcattgctgttttaaaagcgccaaaaccataccacagcaagaaggctacgccgccccaggtgaccagcgccagcaaccacgggctctgcatcaataacgcgctgccaccaaaaatcccggcgcaaatcaggaccaaatcgctgatagcacaaagtaaggcaatcataatgtggtactgacgacgtatgccctgattcatcacaaaagcattttgtggaccgagcggtaggatcatagccgccccaagtgcaagaccttgaaagtaataagaaaacacgttggatattccgaattaagtatctgatgcagagactatatcgcgggattgttattagcggaaattgataatattaattggcaatcagaaaaactaataagagagaggccagagagtattatctggcctcagcgttgattacgcagctttgtcttctttcacccgcttaaagttcacatccatttgcgggtacgggaagctgataccggcggcatcaaattcacgtttaatacgctccagcacatcccagtacacgttttgcagatcgccgctgttgctccagacgcggaccacgaaattaatgctgcttgcaccaagttcgttcaggcgcacagtcatttcgcgatctttcaaaatgcgatcttcagactggataatattggtcaggatctgcttaacctgatcgatatcggaatcatacgccacgccaataataaattcgttacggcgaactggctcgcgggagaagttaataatatttccggcaataattttaccgttcggaataacgataattttaccgtctgcagtacgcatggtggtggagaaaatctgcacactcagcacagtaccggctacgccgcccaggtcaacatattctccggcacggaacgggcggaacatgacaagtaacacgccagcggccaggttagacagactcccctgcaaagccagaccaacagctaagcctgcggcaccgagtacagcaatgacactcgcggtttgtacacccacgcgtcccagtgcagcgattagcgtaaaggcgataataccgtaacggactaatgcagaaagaaaatcagcaacagtggcatcgattttacgggagatcatcaggcgattcaccgcgttggaaatcatccgcgcgataatcaaaccaacgatgatgatcgcgagtgccgccacgatgtttactgcataacttagcagcagcgcctggttagctaccagccagcttcccgcgccgtttatgctatcgacaacattcaaatcttccattcaatattccttttcaactgactcaaaatggagaaatacactccgccgccttatgacgggcagtctgacaagggtaaacaataaagcataattttgccaaatagatcacagatttctcatctgaatcaccttgcttttggcgaaaaaatccccgcagagcggggctcagacagatatcaatgtgcgctttgtcatgccggatgcggcgtgaacgccttatccggcctacaaaaacctgcaaattcaatatattgcaggatacgtgtaggcctgataagcgtagcgcatcaggcaattttgcttttggcgaaaaaaagacccgcagagcgggccttgagataagcagaaaggaatatcttacagaacgtcgatcgcgttcagttcctggaatgctttctccagacgagcgatcatgctagtctgaccggcacgcagccatacgcgcggatcgtagtatttcttgttcggctgatcttcgcctttcgggttacccagctgaccctgcagataagcttcgttcgctttgtagtagttcagaacgccttcccaggttgcccattgggtatcggtatcgatgttcatttttactacgccgtagcttacggagtctttgatttcctgagcagtagaaccggaaccaccgtggaatacgaagttcaggctgttgtgcggcaggttgtgtttcttggaaacatattcctgagaatcacgcaggatggtcggagtcagaaccacgttacccggcttgtaaacaccgtgtacgttaccgaaggacgctgcgatggtgaaacgcgggctgattttgctcagttcggtgtatgcgtaatcaacgtcttccggctgggtgtacagtgcagaagcgtccatgtggctgttgtccacgccgtcttcttcaccaccggtgcaacccagttcgatttccagagtcatgccgattttggacatgcgctccaggtatttagagcagatttcgatgttctcttgcagagattcttcagacaggtcgatcatgtgagaagagaacagcggcttaccggtagctgcgaagtgtttttcacccgcgtccaacagaccgtcgatccacggcagcagtttcttcgcgcagtggtcagtgtgcaggataaccggaacaccataatgttcagccatctggtgaacgtgatgcgcaccagagatcgcgcccaggatagcagcaccctgcggaacgtcagatttcacgcctttaccagcgataaaggaagcaccaccgttggagaactgaacgataaccggcgctttaactttagcagcggtttccagtacggcgttgatggagtcagtaccgacgcagtttactgctggcagtgcgaagttgttttcttttgctacctggaaaactttctgtacgtcatcaccagtgattacgccaggttttacgaaatcaaaaatcttagacatgtctcttgtcctgtatcgtcgggccttatactcgtcatacttcaagttgcatgtgctgcgtctgcgttcgctcaccccagtcacttacttatgtaagctcctggggattcactctcttgtcgccttcctgcaactcgaattatttagagtatgaaaaattgcgtgctctaaaagcgcgctgaaacaagggcaggtttccctgccctgtgattttttacttcttagcgcgctcttcgagcatcgctactgcaggcagtactttaccttccacgaattcgaggaatgcgccgccgccagtggagatgtaggagattttgtcagcaatgccgaacaggtcgattgctgccagagtgtcgccgccgccagcgatggagaacgcttcgctgtctgcgatagcgttagccacgatttcagtacctttgcggaagttcgggaattcgaacacgccaaccggaccgttccacagaatggttttcgcattcttcaggatttcagccagttcctgagcggaagcatcaccgatatccaggatctgctcgtcagctttcacatcgttaacagatttcagggtagccggtgcagtttcagagaactcggttgctacgcgaacatcagacggaaccgggatgttgcaggtggtcagcagacgtttagcttcgtcaaccaggtcagcttcgtacagggatttacccacatcgtggccttgtgccgcgataaaggtgttagcgataccaccaccaacaatcagctggtcagcgattttagacagggagtccagaacggtcagtttggtagatactttagaaccaccaacgatagccaccatcgggcgagcaggttctttcagtgctttacccagcgcgtccagttcagctgccagcagcgggcctgcgcacgcaacgtcagcgaatttaccgataccgtgagtagaagcctgcgcgcggtgagcagtaccgaatgcgtccattacgaacacgtcacacagtgcagcgtattttttggacagggtttcgtcgtctttcttctcgcctttgttgaagcgaacgttttccagaacaaccagttcaccttcagcaacgtcaacgccgtcgaggtaatctttaaccagacgaaccgggttagacagtttgtctttcaggtagttaacaaccggcagcagagagaattcttcgttgtactcgccttcggtaggacgacccaggtgggaagttaccatcacttttgcgccttgtttcagggccagttcgatggtcggcagagaagcacggatacgcgcgtcgctggttactttcccgtcttttactggtacgttcagatccgcacggataaatacacgtttcccagcaagatccagatcggtcatcttaattacagacatggtgaatcctctcgttgattctaaaagttttgcagacgctgcttgcgtcttacctgaaagcaacagtagccatagctaacgtcgtgtcgagcattcggttagcaaagccccattcgttatcgcaccagaccaacgttttgatcaggtgtgcgccactgacccgggtttgggtgccatcgacaatggcactgtgcggatcgtggttaaaatctacagagaccaacggcaattccgtatagtcaactataccatgaaatgcaccttgtgctgctttttgcagcaacaggttgacttcattggcttttacaggtttcttcaccgtcacgcttaaatcgattgccgtcacatttatggttggcacacgtaccgcaatcgcttcaaagcgatcgttaaattgcggaaaaaatcgtgtgataccggcggccagtttagtatcgaccggaatgatgctctggctggctgcccgggtgcgacgcaggtcaggatggtatgcatcaataacctgttgatcgtgcatggcggagtgaattgtggtcacagtgccggactcaataccgtacgcatcatctaacaatttgatgacgggaattatgcaattcgtggtacaggaagcgttagaaacgatgcggtgttccgcacgaagttgatcctgattgacgccgtaaacaacggtcgcgtcgagatcgttactgccaggatgactaaagagcacttttttggccccggcggcaatatgcgcttcgccatgctcgcgggagccatatacgccggtgcagtcgaggactacatcaacgccaagttcacgccaggggaggctttgcagactacgttcatgcaatacgcggatggcgtcatcaccaacaaaaagttgatcgcgttcctgtcgtacttcccatgcaaaacggccatggctggtgtcatatttcaacaaatgcgccatgcccgcagcatccgccagttcgttgattgccaccacggtaatttccgcccggcgtccggattcatacaaagcacgaaccacattacgcccgatgcgaccgaagccatttatcgctacgcgtacggtcatagatctcctgcaaggttttccctgagcaaatttgccagacagagtaatccagcaaatcgtccggggaaaccttacctgtcgcaaactgcgactgattggttaattgtcgaacatttaatcgactgaaacgcttcagctaggataagcgaaacgtggaataaaaggaatgtttgtccagccgaagaagacatttatctgactcacatcacacttttatccccttttgtgggaagctttattccaggctggcgtaataataaccctacaataactggaataaattgtcagcttgtgaagtgataccggccttcttcagtcatctctactatcagattggcctgacggctattcatcagcacacgctcgacattggggccatcggtgcgggcataaaatgcttcggctacttgccgcgttaatcctcccgcaattttacgactaatcaagcgctcccgcagaatttgagcaggtgcatgaataaaaatagaaaaatcgcagaaagatgccaactccagccacttttcatcatccagtaacaaccagtttccttcgacgatgacgagtggtgcggtaacgtgcaacgcatcttcaacaggatcatgcttttgtcgatcgtactgcggccacgtacaatccccttccacgacctggcgcagattttccgtcagtttcgcaacgtcaaatgtctctggtgcgcctttgaaggggcgcaattgatgcgcatccagccagctattgtaatggtgaaaaccatccatcgggagcgtctgaatagcgggcagttccgggtcttgttgcgcgagatattcccagaaggtggttagggtacttttacccgtccccggcggagcgcaaagaaaaaccaccgtacgccgctgcggatttaccgtctgtaaggccgccaacatgtgcagcaacggtttatgtacattttcaatctcttcgttctggtactgtgcctgtatcttcagcccattcaccgttaattcaattttcacggcgttaattcctttaaggtggtcgttactgccagcgtcagcgccgttttgaccattccgctaaaacgcgcctcactccagacggagaaatcagcgaacttcatcgcttttaacgcgtcatagagcatcgcattgcgggttatgctattgacgttgctgataaaatcccaggtcatgtcatcggcaaatccgggcgtttcatcctgttcgttcaggtaatgccagaactgggaaaaatgcgtgatatcggcgtacaaccatttatccattttccccaacgcataaatcaaacgcagtgcaacatcaatatcgtcaagcgggccgctttgggcgagtaacggcttcactgcatattccacgatctcttcatcgttatcgacaaacaggctcggcagaaactggcgtatcccctggagcaaaatggtatgcgcagttttcataaaactaaataaattgtcctgtgcatccagttgctcaagcacatcatcttctgtcagcgtcgccattggtcttccgatagatcaccatcaatgcagggagtctattatattacacgtttggtccgcgccgccgatcagtaatgtctgcgtccgcaccccattcgccgtctgttggataccgttcaccagctcaccgcccgtcacgcccgtagcgctaaagaggatatcgttccccctcaccagttcatcgaggctgtacacacggttaacgtcaacgcccattgccttgcaacgcttgcgctcctgctctgcaatctgccgattttccgtgtaatcccctttagcctggcaaaagtcaatcagctcggcctgcatatccccgcctaatgctttaacggcacaggcagaaatcacgccttctggcgcaccgccgatggtgtacatcacatcgtaaggattatcctgccagcaggtcagcacgctggcggcgacatcgccatccggcagggcaaaaaccttcacgcccagctgtgttgcttcctcaatcgcggcactcaggcgcggtttatccagcgtaaccatgcgcagcttatccagcggtttgcctaacgctttcgccacgttgcgcaggttgtccgtcagaggcaaagacagatcaatcgcgcccgccgccagccgattaacaaccagctttttcatatacatatcgggcgcatgtaacaggctatctcgaggggcgaaagccatgaccgccagcgcattgctctgccccatcgccaccatccgcgtgccttcaatgggatcaaccgcgatatcgacttctggcccatcgcctttgcccacctcttcgccaatccacagcatcggcgcatggtcaatttctccttcgccgataaccactcgtccacgaaaagcgacgtcgtttaatgcctggcgcatcgcggtgaccgccaggccatcaattttatttttgtcgccacatccggtttgcggccaggcagccaacgctgcctgttccgtaacgcgaaataatggccacgccagggacatcattgcgcggcctccccgatatcaacgccaaattgtgccagcagatatttctcggcctgttcattccagatgccgtgcgtttcctcaaccagccgcgccaactctttaaacagcggatcggttttgcctttttcggcaaaatcggcaatggcagtgagcggcatggtcacgccgttataaatgagttttttaccgccagggatatccggcagattgagcacggtttctggcaccgcatccaggccaccgatatgggtcaccataaagctcggctgtaactgcccagtggcgctaagggcaatcgcctctttcatgtcgtccgtactaccgccagatgtaccgacgacgtgcgtgctgttgtaatggacgttgtagaaattaaacggcactttgaagtttttatccgtcggcccggcaaagaagttcagacagccatcttccgccagtaattcatcagccatctcaacgacagcaggcaccgccgcataaacaaaaatgtcatcgaacccggcatctcctgtcagcgcccgcagcatctggacaggatcgctcatccctttggtattcacatacaccagctcaatgcctttactggccgccagttccaccggcagcagcttctgtacctgcgccagacgtttgtcgtcgatatcgaccaccaccacccggctcggttgtatgccgccgttaatggcgtaatcgatagcgccaatgcccatcggacctgcacacgccagcagtgcaatattgccgccaggtttgacgcccatgcgatgctcataaacatattgcgtggtgtgataattggcatgataagcaccaataatgcagcacataggctctgccaggctcgccgcagcaaaataagagccgtgatacggtaatacgcagcccaaattaatggcgatttcgggaataatcatataagtggcattgccgccaaaatattcgtagctgtagcccgcactatatccgcttggtaaccccatcgccggttgcaatacaaaacgctggccttttttatatttgccagtgagatttttacccacttcgacaataaccccggcacattcatgcccggtaatgaccggatgattttctaaatcgtcgggtacgcgtttatgttcactaccgagtaacgccgctttccaggtgcttaaacagacgctgtcagaaattacactcaccagtaattcattatcggtaatttctggcagttcaaatacgcgcagacggacatcccgcttgccataaatagcagcaactttggttttcatttttacctctgtaatcagtgtttatgttcggcggttaattgattaaataaagtgtcgagttttggatcgccaatatagttattaatcaatatcagtggtttatccgtcacacgtttcacgcgcccttccagactggcatgagtaacgacgatatccgcatccgcaggcacgttttctatggcgtaatgttttacttcaattgccagccccgctttttccaggcgtttacggaaggtggtcgcgcccatcgcactggagcccatccccgcatcgcaaacaaaggcgatacgcttaaccctgcttaagctgaatgcaccctcttgtttcatcgccttaaccgcattggcactctgagcaaactcatcttcgctctccgtttccaccgttttttccatcttcagtatcaggctagtaatagcaaaggacaccagggtacctaccgtaacaccggcaattgtcgccaggaagctgcctttcggcgtcagtgccaggtaagcaaagatagaccccggacttgggccagccaccagaccaccgtccagtaagttaaacatccaggtgccagacataccgcccgcaatcatggcaataatggtcagcggcttcatcagcacatacgggaaatacagttcgtggatcccaccgaggaagtgaataatcatcgccccgggcgcagaacgtttactcatccctttaccaaacaaggtaaacgccagcagcagccccaggcccggacctgggttagaggccaccataaagaagatggatttaccgttaacgctagcctgttgcattcccagcggataatagacgccctgatcgatcgcattattgaggaaaagcactttcgccggttcattgatgacactcaacaatggcagataacccgcatgtaccagcgcctcaatacactctttgacgaaagtattggcaattaacaccgccgggccgataacttcaaaacccagcagacaaaggagcatccccgcgatacctaaactgaagttattgataaccatctcaaaaccggcaggtatgcgtttttccagtgccttatcgacatattttatgaccaacccaccgagcggccccatgatcatactgccaaggaacatcgggatctctgcgccaacgatcacaccaatagtacctattccgcccatgaccgccccgcgtttaccgccgaccagatgaccacctgtagaaccaatcatcacgggcaataaataggtaatcatcgggccgacaattttggcgaaatgttcgttaggcagccaaccggtgggaataaataacgcagtaataaaaccccaggcaataaaagcaccaatattggggatgaccattgcagtcaaaaagcccccaaaagcctggacctttgcacgagcagacttgttttccataatattatcctgtagaggagagagtaattatccgcggctgataatgtccgctaattgtttttcactacttgctgttaagagttgttcgagtatttcttcttcgcacagtaattcacttaacgcctgaatagcgccaatgtggctatcggcatcggcagcagagagtccgatgagtaatttaattggttcgtcattccccggaaaataaacaccttgttcaagtaatgtcaaagacatcccggttttaagcgccccacattccggtcgcgcatgaggcattgccacgcctggtgcgagaatataataagggccattgttaatggtggaatctttaattgcctgaatgtaattctcgctgatatagtttttatccagcaaacttaccatgctgaaatcgatagcttcctgccaatcttttgcactatgtataacactgatactactttctggaaaataatcactaagccgcataaattatccttattttatttttagggtaccgtccggcggtaaaaataaaatactcgtgcggtttaatgaaagcaattgagcagggaaaccggtgttttgaaaacagtgaattattaatttcttatataacattgagttatagatataacaacaaatgtcaatacgcatatcgtgatgcatattacataattgatatttattgcatataaatatttgtgatctacaacacgccttatctattgcttgtccgcaaacggacatatcaaggtaataaaaaaggtcgccgaagcgacctttttacccgaaatgctaattacagcagttcttttgctttcgcaacaacgttatcaacagtgaagccgaactcttcaaacagcagctctgccggagcagattcaccgaaggtggtcataccgacgatagcaccgttcaggccaacatacttgtaccagtagtcagcaatacccgcttctacagcaacgcgtgcagtaaccgctttcggcagtacggattcacggtaagcagcatcctgcttgtcaaatgcgtcggtagacggcatggacaccacgcgcgctttcacgccttcggcagtcagtttttcgtaggcagcaacagccagttcaacttcactaccggtagcgatgaaaatcagttccggctgaccggcgcagtctttcagcacataaccaccgcgcgcgatgtttgccagttgctcttcagttcgttcctgctgcgccaggttctgacgggagaggatcagtgcggtcgggccgtcctgacgctcaacaccgtatttccacgcgaccgcggattcaacctggtcacacggacgccatgtagacatgttcggggttacgcgcagagaagcgacctgctcaaccggctggtgagtcgggccgtcttcgcccagaccgatggagtcgtgggtgtaaaccatcacctgacgctgtttcatcagcgcagccatacgtacggcgttacgtgcgtattccacgaacatcaggaaggtggaggtgtacggcaggaagccaccgtgcagggagataccgttagcaatcgcggtcataccgaactcgcgaacaccgtagtggatgtagttacccgcagcatcttcgttgattgctttagaaccagaccacagggtcaggttagacggcgccaggtcagcagaaccgccgaggaattccggcaacagcggaccgaacgcttcgatagcattctgagacgctttacggctggcgattttcgccggattagcctgcagtttagcgatgaactctttcgctttagcgtcgaagtcagacggcatttcgcctttcatacggcgggtaaattcagcggcttcctgcggataagctttcgcgtaagcagcgaatttctcgttccatgcggattctttcgcctggcctgcttctttcgcatcccactgagcatagatttcagacgggatttcgaacggcgcatatttccagcccagttgttcgcgggtcagggcaatttcagcgtcgcccagcggcgcaccgtgggagtcgtgggtaccggctttgttcggggaaccgaaaccgatgatggttttgcacatcagcagggaaggtttgtcagtcactgcgcgcgcttcttctactgcgcgtttgatagatgccgcgtcatgaccgtcgatgtcgcgaataacgtgccagccgtaagcttcgaaacgcattgcggtgtcgtcggtgaaccagccttcaacgtgaccatcgatagaaataccgttgtcatcgtagaatgcaatcagtttacccagcttcagcgtacccgccagagagcaaacttcgtgggagatgccttccatcatgcagccgtcgcccatgaaggcgtaggtgtagtggtcgacaatgtcgtggcccggacggttaaactgcgccgccagcgttttttctgcaatcgccataccgactgcgttggcaataccctgacccagcggaccggtggtggtttccacaccagcggtgtaacccacttccgggtgacccggagttttagagtgcagctgacggaagtttttcagttcttccatcggcagatcgtaaccggtgaggtgcagcaggctgtagatcagcatggagccgtggccgttggacagcacgaagcggtcacggtcagcccaggacggattctgcgggttgtgtttcaggaaatcacgccacaggacttcggcaatgtcagccatacccataggggcacccgggtgaccggatttggctttctgtactgcgtccatgctcagcgcacgaatagcattggcaagctctttacgactggacattttgactccagatcggatgatgaagggcacgcccttaacgacttgacgacagcgcgttttgggctacgccggaaaatttgccaacaatttaccgcaagccgcgcgtcatgtacatggaacatccttttgccgcttcagaaatctctggatcatgctcgcatgttgcgcaatctactcgcccgtccgctgcgcttttccttatactgagactgagcgtcgattcacctgcaaacggcgcatttttagaataatcctgaccttgtgcggaagagaaaacatgaaaattcgcgccttattggtagcaatgagcgtggcaacggtactgactggttgccagaatatggactccaacggactgctcagtagtggagcggaagcttttcaggcttacagtttgagtgatgcgcaggtgaaaaccctgagcgatcaggcatgtcaggagatggacagcaaggcgacgattgcgccagccaatagcgaatacgctaaacgtctgacaactattgccaatgcgctaggcaacaatatcaacggtcagccggtaaattacaaagtgtatatggcgaaggatgtgaacgcctttgcaatggctaacggctgtatccgcgtctatagcgggctgatggatatgatgacggataacgaagtcgaagcggtgatcggtcacgaaatggggcacgtggcgttaggccatgtgaaaaaaggaatgcaggtggcacttggtacaaatgccgtgcgagtagctgcggcctctgcgggcgggattgtcggaagtttatctcaaagtcaacttggtaatctgggcgagaaattagtcaatagccaattctcccagcgccaggaagcagaagccgatgattattcttacgatcttctgcgccaacgcggcatcagcccggcaggtcttgccaccagctttgaaaaactggcaaaactggaagaaggtcgccaaagcagtatgtttgacgaccatcctgcatccgccgaacgcgcccagcatattcgcgatcgcatgagcgcggatgggattaagtaaagcctggtggtgtcgaacgtaggtcagataaggcgttcacgccgcatctgacatgaatggcacatttgttaccttgtgcgcattgccggatgcgatgctggcgcatcttatccggcctacgggtgccgaacgtaggtcggataaggcgttcacgccgcatccgacattaatggcacgttttacccgtgcgcatcgcatctggtgcttactcgccctttttcgccgcctgaatatacagcatttccagcgccagcgttgccgctgccagagcagtgatttcgctctgatcgtatgccggagccacttccactacgtccatcccaacaatgttgagatctttcaggccgcgtaccagtttaatagcgcgatcggaggtcaggccgccaatcactggcgtaccggtgcctggtgcaaaagcaggatccaggcagtcgatatcaaaagtcaggtaaaccggcatatcacccacaatctgtttcacttgggcgataacgtcatccacgctgcgatcgttcacctggcaggcgtccagcacggtaaagccgttgtctttatcaaactcggtacgaataccaatctgcacggaatgattcgggtcgatcagaccttctttcggcgcggtatagaacatagtgccgtggtcaaattcacaaccgttcgcataggtatcggtgtgggcgtcaaagtgtaccagcgccattttgccgaaatgcttcgcatgagcacgcagcagcggcagcgtaacaaagtggtcaccaccgaaagagagcatacgcttaccggcagccagcagcttctcggcgtgcgcctgcagcttttcgctcatctcacgggcatcgccaaaggcatataccagatcgccgcagtccacgacgttcagacgctcacgcatgtcgaaattccacgggaagcggttgtgttcccaggccagattcgtgctaacctgacggatcgctgccggaccgtggcgaccacccgcacgaccagaagtggccatatcgaacggcacgccagtaatcacccagtctgcatcgctgtcatacggctggaagttcatcggcaggcgtaaaaaaccaaaggcattggaaaccagactgttatcgtattgatgacctaaggtgctcatggatggactcctattacaaagtcgatataaaaaaacccttccgcgtcgttaggcccgacgaggaagggttggatttgtcacaataaattgtggcggattatcaccgctaaattaagcggattcaagtaacacaggacttactcatcttcaagataagtataaccgtacaaacctgcctcgaactcttcaaggaactgttgttgcagttcagcatcaagatcggttttcttcacttgatcgcggaactgggttaacagcgttttcggatcgagctgtacatattgcagcatgtccgccacggtatcgccttcgtcagacagttctacttctacgctaccgtcagggaagacgaacacgtcaaccgcttcggtatcaccgaacaggttgtgcatgttgccgaggatctcctgatatgcgccgaccataaagaaaccgagcatcggcggattctctggatcgtactccggcattggcattgtcgtggcaataccgtcaccatcaatatagtggtcgatagcaccgtcagagtcacaggtaatatccagcagcacagcgcgacgttccggcacttgatccagcccttccagcggcagaaccgggaacaactggtcgatcccccatgcgtccggcatgctctggaacaggctgaagttgacgtacattttgtccgccatacgttcctgcagctcgtcgataatcggacgatgagcacggttttgcggatccagctgcttttgcacttcatggcacatgctcaaataaagctgctcagcccatgcacgttcttgcaggctaaagatgccggaagagtagccgatatgaatgtcgtgcagatccatctgactgtcgtgtaaccattcacgcagagaacggcgagttcccggttcgtgcatctcctgccaggtttcccacatgctttgcagcgcgcgcggcgcatcttctgcaggcgcggtcggcaccgtgtattcgttacgttccacgccgatgatattagacaccagcacggtgtgatgcgcagtcaccgcacgaccgctttcggtgattaccgtcggatgcggcagaccgttttcttcacacgcatcgccaatcgcccagataatgttgttggcgtattcattgaggccgtagttcacgctacagtcggactggctacgagtaccttcataatccacgcccagaccgccgccgacgtcgaagcactgaatattgacgcccagcttgtgcagttccacatagaaacgcgcggattcacgaacgcctgtcgcgatatcgcgaatattcgccatctggctaccgaggtggaagtgcagtagttgcaggctgtcgagacgcccggcttcacgcagggtttcaaccagttgcagtacctgagtcgcagccaggccgaacttgcttttttccccgccggaggactgccatttaccgctaccctggctagccagacgtgcacgcacgcccagacgaggaacgacattcagacgttctgcttcatccagcacaatggcgatttcactcatcttctcaatgaccagatagaccttgtgccccatcttctcgccaattaatgccaggcggatatattcgcggtctttataaccgttgcagacgatgacgctacgggtcatgccagcatgtgccagtactgccatcaactcggctttggaaccggcttccagacccagcggttcgccgctatgaatcagggactcaatcacgcggcggtgctggttaactttgatcggataaacaaggaagtaatcgccgttatagccgtaggattccctcgcacgtttgaacgcggcgttaatggaacgcaaacggtgctgcaggatctgtgggaaacagaacagtgcaggcagacgctggccctgtgcttcacgagttttcactaactgcgcgagatcgacgcgagcttccgggacgtccgggtccgggcacacgctaatgtggcccagctcgttaacgtcatagtagttattgccccaccaggcaatattgtaagtacgcagcatcttgctggcttcctgggagctcattgcaacctcctgcatggagcgtagtacaccgtgttcgcccgcactgctaggcaaacccatagacatgtcgtcagacatagcgaacctcaaattattttattaagtgtaaaacagttaacgactatcgcagcctggaactggcttaacaacccataagcacatggattttccagcagactatgctgacgctccaactgcgcaaccggtttctttttcataacattattaagcacataaccgaacgtaagtgtgaaagttcggcgaaaccacgagaaaactcttgtttttacaagagcgcccttgttcagtcctcagtaactgtaaccagctcttgaatcctgagaagcgccgagatgggtataacaagcgcaggtatgcaaagcagagatgcagagtgcggggaacgaatcttcaccagaacggtgagacaggttaagcagcagacaacggttcattatttcgtaagtcctccacggccgcctgttaagacgaacccacaagccaaaactctgattagtacccggctggaagtggcaacacgaaagaaacgtcgtgtgctttttatttaagccgcgcgccgcgttttataccccacaatggcagaaaattgcaaaagataaatacgcagaatgccggcattgtcaggaaaaatttccagccacgtttttaacagaatgagacagctttcaaaaaaaagtggaaatagggtgaagaattgacctaaaatagccatccagatgttaatccatccataccgattaacactcagactgccagtgtttttaacctgcagagtcgtggtaggatccgctaccacagaaaatccacacaacagtttgagctaaccaaattctctttaggtgatattaaatatggcaaaacacctttttacgtccgagtccgtctctgaagggcatcctgacaaaattgctgaccaaatttctgatgccgttttagacgcgatcctcgaacaggatccgaaagcacgcgttgcttgcgaaacctacgtaaaaaccggcatggttttagttggcggcgaaatcaccaccagcgcctgggtagacatcgaagagatcacccgtaacaccgttcgcgaaattggctatgtgcattccgacatgggctttgacgctaactcctgtgcggttctgagcgctatcggcaaacagtctcctgacatcaaccagggcgttgaccgtgccgatccgctggaacagggcgcgggtgaccagggtctgatgtttggctacgcaactaatgaaaccgacgtgctgatgccagcacctatcacctatgcacaccgtctggtacagcgtcaggctgaagtgcgtaaaaacggcactctgccgtggctgcgcccggacgcgaaaagccaggtgacttttcagtatgacgacggcaaaatcgttggtatcgatgctgtcgtgctttccactcagcactctgaagagatcgaccagaaaagcctgcaagaagcggtaatggaagagatcatcaagccaattctgcccgctgaatggctgacttctgccaccaaattcttcatcaacccgaccggtcgtttcgttatcggtggcccaatgggtgactgcggtctgactggtcgtaaaattatcgttgatacctacggcggcatggcgcgtcacggtggcggtgcattctctggtaaagatccaagtaaagtggaccgttccgcagcctacgcagcacgttatgtcgcgaaaaacatcgttgctgctggcctggccgatcgttgtgaaattcaggtttcctacgcaatcggcgtggctgaaccgacctccatcatggtagaaactttcggtactgagaaagtgccttctgaacaactgaccctgctggtacgtgagttcttcgacctgcgcccatacggtctgattcagatgctggatctgctgcacccgatctacaaagaaaccgcagcatacggtcactttggtcgtgaacatttcccgtgggaaaaaaccgacaaagcgcagctgctgcgcgatgctgccggtctgaagtaatctttcttcacctgcgttcaaaggccagcctcgcgctggcctttttcttttggataggcgttcacgccgcatccggcaaaaaaaccgcccgcacaataacatcattcttcctgatcacgtttcaccgcagattatcatcacaactgaaaccgattacaccaaccacaacagacaaagatttgtaatattttcatattattattcggttttcacagttgttacatttcttttcagtaaagtcttaattgcagataacagcgtttaatctatgatgatataactcaattattttcatgcacttaaatcataactaagataaatgttagtgtaagcgattacactgatgtgatttgcttcacatctttttacgtcgtactcacctatcttaattcacaataaaaaataaccatattggagggcatcatgcctgacgctaaaaaacaggggcggagtaacaaggcaatgacgtttttcgtctgcttccttgccgctctggcgggattactctttggcctggatatcggtgtaattgctggcgcactgccgtttattgcagatgaattccagattactagccacacgcaagaatgggtcgtaagctccatgatgttcggtgcggcagtcggtgcggtgggcagcggctggctctcctttaaactcgggcgcaaaaagagcctgatgatcggcgcaattttgtttgttgccggtagcctgttctctgcggctgcgccaaacgttgaagtactgattctttcccgcgttctactggggctggcggtgggtgtggcctcttataccgcaccgctgtacctctctgaaattgcgccggaaaaaattcgtggcagtatgatcagcatgtatcagttgatgatcactatcgggatcctcggtgcttatctttctgataccgccttcagctacaccggtgcatggcgctggatgctgggtgtgattatcatcccggcaattttgctgctgattggtgtcttcttcctgccagacagcccacgttggtttgccgccaaacgccgttttgttgatgccgaacgcgtgctgctacgcctgcgtgacaccagcgcggaagcgaaacgcgaactggatgaaatccgtgaaagtttgcaggttaaacagagtggctgggcgctgtttaaagagaacagcaacttccgccgcgcggtgttccttggcgtactgttgcaggtaatgcagcaattcaccgggatgaacgtcatcatgtattacgcgccgaaaatcttcgaactggcgggttataccaacactaccgagcaaatgtgggggaccgtgattgtcggcctgaccaacgtacttgccacctttatcgcaatcggccttgttgaccgctggggacgtaaaccaacgctaacgctgggcttcctggtgatggctgctggcatgggcgtactcggtacaatgatgcatatcggtattcactctccgagcgcgcagtatttcgccatcgccatgctgctgatgtttattgtcggttttgccatgagtgccggtccgctgatttgggtactgtgctccgaaattcagccgctgaaaggccgcgattttggcatcacctgctccactgccaccaactggattgccaacatgatcgttggcgcaacgttcctgaccatgctcaacacgctgggtaacgccaacaccttctgggtgtatgcggctctgaacgtactgtttatcctgctgacattgtggctggtaccggaaaccaaacacgttagcctggaacatattgaacgtaatctgatgaaaggtcgtaaactgcgcgaaataggcgctcacgattaatctccccaagcttcctcccatcgcggaggaagccacctcttgcagtcatcttttcttcgctctatcctctgccgctatgaaaacatcccgtctccctatcgccatccaacaggccgttatgcgtcgcctgcgggaaaaactcgcccaggccaacctgaagctagggcgtaactacccggagccaaaactctcttacacccagcgcggaacctccgccggaacggcctggctggaaagctatgaaattcgcctcaatcccgttttgctgttggaaaacagtgaagcttttattgaagaagtggtaccgcacgaactggcacatttgctggtatggaaacatttcggccgcgtagcgccacatggcaaagagtggaagtggatgatggaaaacgtgctgggtgttcccgcccgtcgtacgcatcagttcgaactgcaatccgtgcgtcgcaacaccttcccctaccgctgcaagtgccaggagcatcagcttaccgtacgccgccataatcgcgtagttcgtggcgaggccgtctatcgctgtgttcactgcggtgaacagctggttgcgaaataaccatctgaactatcaggaactttcctgatttggctgattgcataccaaaacagctttcgctacgttgctggctcgttttaacacggagaagtgcctacactagcgggattctttttgttaacccctaccccacgcgtacaaccgcgtggggagacgacgcggatttttaactatgcgtatcccccgcatttatcatcctgaaccactgaccagccattctcacatcgcgctttgcgaagatgccgccaaccatatcgggcgcgtactgcgcatggggccggggcaggcgttgcaattgtttgacggtagcaaccaggtctttgacgccgaaattaccagcgccggcaaaaaaagcgtggaagtgaaggtgctggaaggccagatcgacgatcgcgaatctccgctgcatattcacctcggtcaggtgatgagccgtggtgaaaaaatggaatttactatccagaaaagcatcgaactcggtgtaagcctcattacgccacttttttctgagcgctgcggcgttaaactggatagtgaacgtctgaacaagaagcttcagcagtggcagaagattgcaattgctgcctgtgagcagtgtggtcgtaaccgggtgccggaaatccgtccagcgatggatctggaagcctggtgtgcagagcaggatgaaggactgaaactgaatcttcacccgcgcgccagtaacagcatcaatacgttgccgttaccggttgaacgcgtccgcctgctgattggcccggaaggcggtttaagcgcagatgaaattgccatgactgcccgctatcaatttactgatatcctgttgggacctcgcgttttgcgtacagagacaactgcgctcaccgccattaccgcgctacaagtacgatttggcgatttgggctaacggagaagaataatgatcaagctcggcatcgtgatggaccccatcgcaaacatcaacatcaagaaagattccagttttgctatgttgctggaagcacagcgtcgtggttacgaacttcactatatggagatgggcgatctgtatctgatcaatggtgaagcccgcgcccatacccgcacgctgaacgtgaagcagaactacgaagagtggtttagcttcgtcggtgaacaggatctgccgctggccgatctcgatgtgatcctgatgcgtaaagacccgccgtttgataccgagtttatctacgcgacctatattctggaacgtgccgaagagaaagggacgctgatcgttaacaagccgcagagcctgcgcgactgtaacgagaaactgtttaccgcctggttctctgacttaacgccagaaacgctggttacgcgcaataaagcgcagctaaaagcgttctgggagaaacacagcgacatcattcttaagccgctggacggtatgggcggcgcgagcattttccgcgtgaaagaaggcgatccaaacctcggcgtgattgccgaaaccctgactgagcatggcactcgctactgcatggcgcaaaattacctgccagccattaaagatggcgacaaacgcgtgctggtggtggatggcgagccggtaccgtactgcctggcgcgtattccgcaggggggcgaaacccgtggcaatctggctgccggtggtcgcggtgaacctcgtccgctgacggaaagtgactggaaaatcgcccgtcagatcgggccgacgctgaaagaaaaagggctgatttttgttggtctggatatcatcggcgaccgtctgactgaaattaacgtcaccagcccaacctgtattcgtgagattgaagcagagtttccggtgagcatcaccggaatgttaatggatgccatcgaagcacgtttacagcagcagtaacccaccttagcgagaaggatctcgttgagactctgagtgacagcgcccttctttccacgcatactgggcgctgttgcttttttgaaccaggaaacagaacctctgacaatgaatttacagcatcactttcttattgccatgcctgctctccaggatccgattttccgtcgttccgtggtctacatttgcgaacataataccaatggtgcaatggggatcatcgtcaacaagccgctggaaaatctcaaaattgaagggattctggaaaagctgaagatcacgccggagccgcgtgatgaaagtatccgtctggataaaccggttatgctcggcggtccgctggctgaagatcgcgggtttattttgcatactccgccctccaattttgcttccagcattcgcattagtgacaacacggtaatgaccacttcccgcgatgtgctggaaacgctcggcaccgataaacaaccgtctgacgtattggtggctctgggttatgcctcctgggagaaaggtcaactggaacaagaaattctcgataacgcgtggctaacggccccggcagatctgaatattctgttcaaaacgccgattgccgaccgctggcgcgaggcggcaaaactgattggtgtggatattctcaccatgcctggtgtggcaggacacgcctgatgagtggaaccttactcgccttcgacttcggcaccaaaagcattggcgtagcggtcggccaacgcattaccggcaccgctcgccctttgcctgcaattaaagcacaggacggtacgccggactggaacattatcgagcgtttactgaaagagtggcagccggacgaaatcatcgtcggtttgccgctgaatatggacggcaccgagcaaccattgactgccagagcgcgtaaatttgccaaccgtattcatggccgtttcggtgttgaagtaaagctccatgacgagcgtcttagcactgtggaagcccgttccggtctgtttgaacagggcggctatcgggcgctcaacaaaggcaaagttgactctgcctctgcggttattattctcgaaagctatttcgagcagggatattaaggcgatttaaacgcctggcggagtgtaaataatatcatcgcgtcttattgccggatgcggcgtgaacaccttatccagcacacatctggcagcggctataggtctgataagacgcgttagcgtcgcatcagacatttattgcctttgtaggcccgataagcttgcgcatcgggcatggcaacgtcacaaacgcccttcccccacccggtgctgataactctgctgaaacgttatcatccccacctgctgcccggtttgaataacatgcggtaactggtgggttttcccttcgcgaatcaaattccccaccgcgggtgtgttaatcagcaattcaaatagcgccacgcgtccttcctgtttatccacttccagcttttgactcagcactgcccgtaaactacctgccagttgattacgcacggggtctttttcctgcgccggaaaactatccaccagtcgctcaactgcctgcgcggcaccacgcgtatgtaatgttgccagcaccaaatgcccggtttctgccgccgtcagtgccagacggattgtctcgctgtcacgcagctctccgagcaaaatcacatcaggatcttcccgcaatgcggcccgcaatccgcttgcgaacgtcatacagtgcaaaccaatttcccgctgctggatcaaacatcgctggctggcatagagatattcaacaggatcttccagcgtcagaatatgcgcatcggcatgttgattgagatagccaaccatcgccgccagcgtggtagatttgccactccccgtcgcccccgtcaccagaatcaggccattctcgctcttgagtaattccggcaataccgttggtgcgccaagctgttcgagctgcgggcagtggctaggtaacagccgtaacgccaggctaatgccatgccgttgcgcgaatgcgctgccacgcaatcgctggttttccgccaggctcacggcaaaatccagctgaccattctccagcaatattgcccgctgatcgtcatccagccactcccgcagtagctcttcgacgtccggcgtatcaaacggcgcagcttccattctgccgcgaatgcgccatcgtgcgggccaggcgctgcacaggtgtagatcgctgacgttatgctttacactaagggccacaatttcttccatattcatactaagatcctcggaaaatgaacgatattgcgcataacctggcacaggtccgggacaaaatcagtgcggctgcaacgcgttgcggccgttctccagaagaaattacgctgcttgcagtcagtaaaacaaaacctgcgagcgccatcgcagaagccattgatgccgggcagcgtcaatttggtgaaaactacgttcaggaaggggtagataaaattcgccactttcaggaactgggcgtaacaggattagaatggcattttattggcccgttgcagtctaataaaagccgcctggtggcagagcatttcgactggtgtcataccatcgaccgtttgcgcatcgctacccgtctcaacgaccagcgcccggcagaacttccccctcttaacgttctgattcaaattaacattagtgatgaaaacagtaagtccgggattcaactggctgaactggacgagctggcagctgcggtcgctgaactaccgcgtttacgtctgcgcgggttgatggcaatccctgcgcctgagagtgaatatgtaaggcagtttgaagttgcacgccaaatggctgtagcatttgccggactgaaaacgcgctacccgcatatcgacacgctctctctgggaatgagcgacgatatggaagccgccattgcggcaggtagcacgatggttcgtatcggcactgcaatttttggtgcgcgtgattactctaaaaaataaggaattaaaggaacgccatgaatacgttgactttcctgcttagtacggtcattgagctgtataccatggtgctgttattacgcatctggatgcagtgggctcattgtgatttttacaaccccttcagtcagtttgtagtgaaggtaacgcagccaattatcgggccactgcgccgcgttattccggcaatggggccaattgacagcgccagcctgctggttgcctatattctcagttttatcaaagccatcgtgctgtttaaagtggtgaccttcctgccaatcatctggattgccggtttactgattctgctgaaaaccatcggcctgctgattttctgggtcctgctggtgatggcgattatgagctgggtaagccaggggcgtagcccgattgaatacgtgctgattcagctggccgatccgctgctgcgcccgattcgccgcctgctaccggcaatgggtgggattgatttcagcccgatgatcctcgttctgctgctgtatgtcatcaatatgggtgtcgcagaagtattacaggcaaccggaaatatgctgctgccagggctgtggatggcgttatgaatgccgtaacagttaatgatgacggtctggttttacggctctatattcagccgaaagccagccgtgattctattgtcggtttacatggcgacgaagttaaagtcgccattaccgcgccgccggttgacggccaggccaacagtcatctggtgaagtttctcggtaagcaattccgggttgccaaaagccaggtggtgattgaaaaaggcgaacttggccgccacaaacaaattaaaatcattaatccgcaacaaatcccgccagaaatcgcggcgttaattaattaagtatcctatgcaaaaagttgtcctcgcaaccggcaatgtcggtaaagtgcgtgagctggcgagcctgcttagcgacttcggtcttgatatcgtggcccaaacagacctcggcgttgattccgctgaagaaaccggcctgacctttatcgaaaacgcgattctgaaagcgcgccatgcggcaaaagtgaccgctttaccggcaattgccgacgactctggtctggcggtagatgtgcttggcggcgcgccgggcatttactccgcgcgttattccggtgaagacgcgaccgatcaaaagaatctgcaaaaactgctggaaacaatgaaagacgtaccggacgaccaacgtcaggcgcgtttccactgcgtgctggtatatctgcgtcacgcggaagatcccactccgctggtatgccacggtagctggccgggcgtgattactcgtgaaccagcgggcactggtggctttggttatgatccaatcttcttcgtaccttccgaagggaaaaccgccgccgaactgacccgcgaagaaaagagcgccatttcccaccgtggtcaggcgttgaaactgctgctggacgctttacgtaatggttaaattacctccgctgagtctctacattcacatcccgtggtgcgtgcagaaatgcccgtactgcgatttcaactctcacgcgttgaaaggagaagtgccgcacgacgattatgttcagcatctgcttaacgatctggacaacgatgtggcttacgctcagggccgtgaagtaaagacaatctttattggcggtggtacgccgagcctgctttccggcccggcgatgcaaacgctgctggacggcgtgcgtgcgcgtttgccgctggcagcggatgcagaaattactatggaagcgaaccctggcacggtagaagccgatcgctttgtcgattatcagcgtgctggtgtgaaccgcatctctattggtgtgcagagttttagcgaagaaaagctgaaacgacttgggcgtattcatggcccgcaagaagcgaaacgcgcggcgaagctggcgagcggtttagggttacgtagctttaaccttgatttgatgcatgggctgccggatcaaagtctggaagaggcgcttggcgatctacgccaggccattgaactgaatccgccgcatctttcctggtatcaactgaccatcgaacccaatacgctgtttggtagccgaccaccggtgctgccggacgatgacgcgttgtgggatatattcgaacaggggcatcagttattaaccgcagcgggttatcagcaatatgaaacttccgcttacgccaaacccggttatcagtgccagcacaatctcaactactggcgctttggtgactacatcggtattggctgcggcgcacacggcaaagtgaccttcccggatgggcgcattctgcgtaccaccaaaacgcgtcatccgcgtggttttatgcaaggaaggtatctggaaagccagcgtgatgtcgaagccacagataagccgtttgagttctttatgaatcgcttccgtctgctggaggccgcgccgcgcgtggagtttattgcgtataccgggctttgcgaagatgtgattcgcccacagttagacgaggcgattgcccagggttatctcaccgaatgtgcggattactggcagataacggaacatgggaagctgtttttaaatagcctgctggagctttttctggctgagtaaacttgtattgccggatgcggcgtgaacgccttatccagccgacatgtggcagcggttgtaggtctgataagacgcgcaagcgtcgcatcagacgttgattgccggatgcggggtcaacgccgcatcctgctacaaatcgtgcactatatcaaacttacttaatcaccccattgcgccgcagttgttcggtatcttttttccagcgttcattagcttggttgatatcgtcaattttcatcaaaatcgcgacttttttactgtttatttcactaactttcatcgttaacggatattgccctttttcgagcgttacccagtcatcctgcaatttacggctaagtttttgactttgcagaaaagtctgtcgccgttgttcgttgatatcgaaatctcgtttctgctgaatcggcacttcataacactcttcactctgtttatgacatgccgcaatcgccggttgataaacctctttgtcatatttaaccgcgaacgcctcgctatcgttctgtttattaaactcatcacgctgttggtgaatttttttaaaggcgtcttcgcgggtcatttgcttaccgtttgcatcttttccccaatatgcatccgctgctttctgcgccgccaccatttgcttatcaagcgctttcacttccttttccagcgcaggaatgctgttcttctgggtattcaacgcagattcaagctgactaaagcgataattgaaatcttcgctattcacgatcagatatttattattcgttttgatatcgtcgaccacccgcccacgatcgctggctgccgcctgaaaagagtaaaagttcacgctccagccagacgcgggcgttcctttactggttaacatcgcgctgaattttaccggtttatctttcgtccaggtctgttcgagcagttcgtaatctgccaactgaccgacccaggtatagagatcgtcactggaagagacatcgccttccgcactccaggtggcctgattacccttagcatcaagattttttaaggtgatagcatcaagcttgagaatgccgtgatactgctttttgaattgatcttttaagatattttcagttggcggttcgccatctgcccaggcattaccagtcatcaacataagcagtgccgtgccaacaatccattgctttttcacccgaaaaacctcacgcggaataatttattccggtgattatcattagggtaattaaaattggcaatggacgtgagtctgaagtgaaaaagccccggcacgataccggggcgaggcgattagtactgattgaagatctgctggatctgctgcggatctttggtttgcgtcagagccagttgcagcagaacgcgcgctttttgcgggttcagcgtgccagaggcgacgaagccgtatttcgcatcatccacttcggcatcctgagtggtagcgcccgtcggtacgcgggaagaacgcacgactgcagtaccggttttcgcggcggtcgccagcgtgtcgaacacagatttatacaggttgccgttacccacaccagcgctaacgatgccatcatagcccgcatctaccagtgctttagccggaagatcggatgcgttagcgtagttataaacaatgccgactttcggcagttcattcagcttagagacatcgaatggcgtgtcgctggtatgcttacgtgccggggtacgctggtagtcaatcttaccgttgtgaatgtaacccagaggaccgtagttaacagacttgaaggtcgctacgtcggtggtgttggttttggtgacgtcacggccatcaagcacggtgtcattcatcactaccagcacgccacggttggcggaggctttatcagctgcggtcactaccgcgttatacaggttgaatggaccgtctgcgctcatagacgtggacggacgcattgcgccgaccatcaccaccggtttgtcgcatttcaccgtcaggtcgaggaagtaagcagtttcttccatcgtgtcggtaccgtgggtaatgacgaagccgtcggtcttatcgcagtcggtgttaatttttttcgccagtgtcagccagacattatcgttcatgtcctgggagccgatattcactacctgctcgcctttaacgttcgcaatgtcttttagttgcggcaccgcattaaccagattttctacgccaactttacccactgtgtagttagatttggttgcggagtcaccaccaccggcaatggtcccgccggttgctaaaatggtgatattgggtaatgccaatgctgcaccactaaaacccataaccagtgcggcaagtgccgtctttttgaaaaactccatttcattcctccagttacgtgaacgctacgcattatcccttagctctgtatgggaaatttgacgttaaacaatttacaacgtgaatatattttggagatctacaaagttagaggcaggtaacaaaacgaagaattaaacggcataaaaaagtattatgccgtcttaaaatagaggattattttaaattcccgaccagggctttgcggctatcttccagagtcacaacgcggctacaaacatctttgccaaactgctggaaatctttttcctgctttttccactcggtttggatactggattgcagcccccccaggcttcccagcacattctgtaatgggttaccgccgcttttcagcaccgctttcgcgcccatttcattaatgctgtcctgtaaaattccacccattgcctgattcactaattgctggccttcggcgcgaacctgatcaatggctttatagtgaaacgtcaggccatcgctgcgcgtttcaataatgcggttcatctgctctttcagctgcgcatcaagtttggtcagacggctgcgcattttgctgctttcgcccatctcctgaacgataattttatccagagcaatacgggctttctcgacgcggcttttcgcgccttcatcaatccacggcagcgtgctgcgtagttcagcctgataatccttcgcctgctcgcgctgggcggcattcagggaatattgcttaccgttatacatcacgttgccgtctggcgtgatcaccagattgccgttttcgcccttcacctgcacggtttgcgggctgacaatcacatcgtcacgcggcgtgacgctgcactggtagtcggcgtgagcggtcattgccgtcacactaagtgctgccgccagcagcattttgcgcatcatagtcttccctcaagaaaaaatcaggccagcatttgctggccccagattgataacaaagtacgcgttttccatgccggatgcggcgtaaacaccttatcccgcctactcgatcgtgcatctttccaggcctgataagcgtagcgcatcaggcagttttgcatttgtcatcgcccgtatgctttcttagtcccaccaaacgtcgaaaagttcgctggtgcgtacctcatccagtttgcgctcttccagccacttacgcacaatcgcctgatgttcttcggtgcatttgccgatttcctgcatgcagatcagaccttcccaggccagataaccgctgccgtcaaaggccagtttgttcggttcgataacctcgttaataaaatcatcaacggttttatcaatctgttcttcgcttgtaccttccgggaatcgccatgccacgctaaatcctaattcctggaattcgtcgatgtgcatttttttacgcagacgacggctacggttctttgccattatttcaccctctcgaacattaagtcccatactccgtgaccaagacgatgaccacgttgttcaaatttcgtcaccggacgacttgccggacgcggtacgtaatcattgctctcactcaggtttttataaccgtcaatagaagacatcacttcaagcatatgttccgcataaggttcccagtcggtcgccatatggaatacgccccccagctgcagtttgctttttaccagttcggcaaacggcacctgaacgatacggcgtttattatggcgcgctttgtgccacgggtcagggaaaaagagctgcaccatgcgcaaactattgtcaggaatcattttatgcagcacttcaaccgcatcgtgacacatcacgcgcaggttgcttaaaccttcttcatgcgcagaagccaggcacgcaccaacgcccggactatgcacttcaatgccgaggaagtcctgctcagggcgatctttagccattgccaccaggctcgcccccatgccaaaaccaatctcaagcgtcaccggcgcttcacggccaaaaagcgcggggaaatccagcatatcttcgctgaactcaacgcccatcaccggccagtagttttccagcgcatgttcctggcctttggtcagtcgcccctggcggcgcacaaaactacggatacggcgcagtgggcggccgttttcatcaaattccggactaatgacgtcgtttttcataaaggtttagtcgcttgtgaaagtgttctgaaaacgggcattatccaaagttagttgccggatgcaagcatgataaggccgtggctgcggaaagttccggtttacaccctgccgtcgctgtgctgcaatcttgcccccaacaacagtgaattcggtgaccatgcaagcgagccaatttagtgcccaggttctggactggtacgataaatacgggcgaaaaactctgccctggcaaattgacaagacgccctacaaagtatggctcagtgaagtgatgttgcaacaaactcaggttgcgaccgttatcccctattttgaacgctttatggcgcgcttcccgacggtgaccgatctcgccaatgcgccgctcgacgaagttctccacttgtggaccgggcttggctattacgcccgcgcgcgcaatctgcataaagcggcacaacaagtggcgaccttacacggcggtaaattcccggaaacctttgaggaagttgcagcactgccgggcgtcgggcgttccaccgcaggcgcgattctcagcctttctctgggtaagcactttccgattctcgacggtaacgtcaaacgcgtgctggcgcgctgctatgctgtaagcggctggcctgggaaaaaagaggtcgagaataaattatggagtttgagcgagcaggtgacgcccgcggttggcgtggaacggtttaatcaggcgatgatggatttgggtgcgatgatttgtacgcgcagcaaaccgaaatgtagcctctgtccgctacaaaacggatgtattgccgccgccaacaatagctgggcgctttatccgggcaaaaaaccgaaacagacgctgccggagcgcaccggctactttttgctattacagcacgaagatgaagtattgctggcgcagcgtccgccgagcggattgtggggcggtttatactgtttcccgcagtttgccgacgaagaaagtttgcggcagtggctggcgcaacggcagattgctgccgataacctgacgcaactgaccgcgtttcggcataccttcagccatttccacttagatattgtgcctatgtggcttcccgtgagcagtttcaccggctgcatggatgaaggcaatgcgctctggtataacttagcgcaaccgccgagtgttggcctagcggctcccgtggagcgtttgttacagcagttacgcactggcgcgccggtttaacgcgtgagtcgataaagaggatgatttatgagcagaacgattttttgtactttcctgcaacgtgaagcagaaggtcaggattttcagctgtaccccggcgagctgggaaaacgcatctataacgagatctccaaagaagcctgggcgcagtggcagcacaagcaaaccatgctgattaatgaaaagaaactcaacatgatgaatgccgagcaccgcaagctgcttgagcaggagatggtcaacttcctgttcgagggtaaagaggtgcatatcgagggctatacgccggaagataaaaaataaaaacagtgccggagcacgcctccggcaacttgcataaaaacaaacacaacacgcacccggaatgatgaaaaaatatctcgcgctggctttgattgcgccgttgctcatctcctgtagcacgaccaaaaaaggcgatacctataacgaagcctgggtcaaagataccaacggttttgatattctgatggggcaatttgcccacaatattgagaacatctggggcttcaaagaggtggtgatcgctggtcctaaggactacgtgaaatacaccgatcaatatcagacccgcagccacatcaacttcgatgacggtacgattactatcgaaaccatcgccgggacagaacctgccgcgcatttgcgccgggcaattatcaaaacgttattgatgggtgacgatccgagtagcgtcgatctctattccgacgttgatgatattacgattagcaaagaacctttcctttacggtcaggtggtggacaacaccgggcagccgattcgctgggaaggtcgcgcaagcaacttcgcggattatctgctgaaaaaccgtctgaagagccgcagcaacgggctgcgtatcatctacagcgtcaccattaacatggtgccgaaccaccttgataaacgtgcgcacaaatatctcggcatggtccgccaggcgagtcggaaatatggcgttgatgagagcctgattctggcaattatgcagaccgaatcttcctttaacccgtatgcggtcagccgttccgatgcgctgggattaatgcaggtggtacaacatactgccgggaaagatgtgttccgcagccaggggaaatccggcacgccgagccgcagtttcttgtttgatcctgccagcaatattgataccggcaccgcgtatctggcgatgctgaacaatgtttatctcggcggaattgataacccaacaagccggcgttatgccgtcatcaccgcctataacggcggcgcaggcagcgtgctgcgagtctttagcaatgataagattcaggctgccaatattattaacaccatgacgccgggcgatgtttatcagacgctgacgacccgccatccctctgcggaatctcgccgttatctttataaagtgaataccgcgcaaaaatcctaccgccgccgataattccattaaccgcccctgacgatgctcaggggcaaaaatgttatccacatcacaatttcgttttgcaaattgggaatgtttgcaattatttgccacaggtaacaaaaaaccagtccgcgaagttgatagaatcccatcatctcgcacggtcaaatgtgctttttcaaacactcatccgcatcacgatgtgaggaaattaacatgaatcttaagctgcagctgaaaatcctctcttttctgcagttctgtctgtggggaagttggctgacgaccctcggctcctatatgtttgttaccctgaagtttgacggtgcttctattggcgcagtttatagcagtctgggtatcgcagcggtctttatgcctgcgctgctggggattgtggccgacaaatggttaagtgcgaaatgggtatatgccatttgccacaccattggcgctatcacgctgttcatggcggcacaggtcacgacaccggaagcgatgttccttgtgatattgattaacagctttgcttatatgccaacgcttgggttaatcaacaccatctcttactatcgcctgcaaaatgccgggatggatatcgttactgacttcccgccaatccgtatctggggcaccatcggctttatcatggcaatgtgggtggtgagcctgtctggcttcgaattaagccacatgcagctgtatattggcgcagcactttccgccattctggttctgtttaccctgactctgccgcatattccggttgctaaacagcaagcgaatcagagctggacaaccctgctgggcctcgatgcattcgcgctgtttaaaaacaagcgtatggcaatcttctttatcttcagtatgctgctgggcgcggaactgcagattaccaacatgttcggtaataccttcctgcacagcttcgacaaagatccgatgtttgccagcagctttattgtgcagcatgcgagtatcatcatgagcattagccagatctctgaaaccctgttcattctgaccatcccgttcttcttaagccgctacggtattaagaacgtaatgatgatcagtattgtggcgtggatcctgcgttttgcgctgtttgcttacggcgacccgactccgttcggtactgtactgctggtactgagcatgatcgtttacggttgcgcattcgacttcttcaacatctctggtagcgtgtttgtcgaaaaagaagttagcccggcaattcgcgccagtgcacaagggatgttcctgatgatgactaacggcttcggctgtatcctcggcggcatcgtgagcggtaaagttgttgagatgtacacccaaaacggcattaccgactggcagaccgtatggttgattttcgctggttactccgtggttctggccttcgcgttcatggcgatgttcaaatataaacacgttcgtgtcccgacaggcacacagacggttagccactaattacgcaaagaaaaacgggtcgccagaaggtgacccgttttttttattcttacttcaacacataaccgtacaaccgtttcacgccatccgcatcggtttcgctataaacaccttgcagctccgggctaaatcccggcaacaaattcaccccttcttccagtgcaaggaaataacgttgaaccgccccaccccagacttccccgggtaccacgcaaagcacgccaggtggataaggcaacgccccttctgccgcaattcgcccttcggcatcacgaatccgcaccaactccacgtcaccgcgaatataagcgctatgcgcatcctgggggttcatcaccacactcgggaaactctgctggcggaacatcgctttttgtaggtctttgacgtcgaaactgacatacagatcgtgcatctcctgacacaactggcgcagggtgtagtcgcgatagcgcaccggatacttgttataaacgctcggcaacacctcaaccagcgggctgtcatcctcaatatgctgttcaaattgcgccagcatcgccaccagttgtgccagcttctcgtggctttccgccggagttaataaaaacagaatggagttgagatcgcacttctccggcacaatgccgttctcacgcagatagtgcgccagaatcgtcgccggaacgccaaagtcgctatattcgccggtttcggcatcgatacctggtgtagtgagtaacagcttgcacggatcaacaaaatactgatccgcggcatatccttcaaagccgtgccacttcgcccccggctcaaaactgaaaaaacggcggtcgctggctaacacacttgtcggataatcctgccacaatttgccatcaacaacgggcgggataaacgggcggaacagcttacagcgcgcaagaatagccttgcgcgcttcaatccctatctcaacacactcagcccacagccgacgcccactctccccttcatgaattttggcgttaacatccagtgcagcaaacagcggatagaaagggctggtagaagcatggagcataaaggcgttattcaaccgcttatgcgggcaaaaacgcgcctgtccgcggatatggttatcttttttatggatctggctcgtctgactgaatcccgcctgctgtttgtgcacgctctgagtcacaaagatccccggatcgttttcgttaagttctaacagcagcgggctgctatccgccatcatcgggataaattgttcataaccgacccacgcggaatcaaacagaatgtaatcacacagatgcccaacggtatcgatcacctgacgggcgttatagacagtgccgtcataggttcccagctgaataatcgccaggcgatacgggcgcggcaggtcggctttttctggcgcaacgtcgcgaatttgctggcgcagatactcttcattaaaacagtgcgcatcaataccgccaatgaaaccaaacgggttgcgactagcttccagatagaccggcgtcgcccccgcctgaatcagcgcgccgtgatgattgctcttatggttgttacggtcgaagagcaccagatcgccacgcgttaacagcgcattcgtcaccactttattcgctgcgcttgtgccgttcagcacaaaataggttttatcggcatgaaagactttggctgcgaatttctgcgcatctttcgcgcttccttcatgaataagcagatcgcccaattttacgtcagcgttacacatatcggcgcgaaagacgttctcaccaaagaaatcgtaaaaatggcgtccggcaggatgctttttaaaaaacgcaccatgttgatgtccagggcaagcaaaggtgctgttgcccatctcaacgtactgcgtcagcgtgtcataaaacggtggcagcaaattctcttcatactgacaggctgcggattccagctccagccactgctgctcgttgccgttgattaccgccgtaacgcccgcaggtaattcaacagcatgttcggaatacaaaaacaccggtagatgaaaaccggtgcgcttaagcaacgcaagaatgccactgcgactatccgcagcggtaatgacgactgccgcgacgtccgtaaaatcagtatctcccaacgccaccacgcgacgatgagaagaaagtcgggataccagttcactactggcggcaatattcatacttttcataagcgcaaacccgtttcggggaagtaagaataccggacaaggtggaaaaccctgccccatgagatatgggtcaaactggtcaccagctccgaccgccagacatcagtaaaagcagaaacgctctgattttactgttgtcctgcagtgagcgtgcgttaacttcaccgcatgagcagtaacatagaaagggaaacgtttcgcgcgaaacggcgataagcgagagaatgtaaggagatggcgtgcatcgggcaaactccgtacagagaggagaaaattcgcgcaatcatggcacctttcgctaaagcgtgcaagccaggactttgcgaacaaacaagccatcgacggcaccaaacggtcataataagaaaatcaaacaatacagctaacaggaactcttgtggtcatcggcccttttatcaacgctagtgcagtcttactgggtggcgttctcggcgcactgctcagccaacgcttaccggaacgtatccgcgtctccatgacaagtatttttggtctggcaagcctggggattggtattttactggtggtgaaatgtgccaaccttccagcgatggttttagctacgctacttggcgctctaattggcgaaatttgtttgctggagaaaggtgtcaatacagcagtcgccaaagcacaaaatctgtttcgtcacagtcgtaagaagccagcgcatgaatcttttattcagaattatgtcgcgattattgtcctgttttgcgccagcggcaccgggatcttcggggcgatgaacgaagggatgaccggcgatccgagtattttaatcgccaagagttttcttgatttctttacggcgatgatcttcgcctgcagcctgggtattgcggtaagcgtgattagtatcccattactgatcatccagttaacgctggcgtgggctgccgcgctgattttaccgctgaccacaccgagcatgatggcagacttcagcgccgtaggcggtttattgctgctggcaaccggattacgcatctgtggcattaaaatgttcccggtggtcaacatgcttccagcactccttctggcaatgccgctttccgccgcctggaccgcctggtttgcctgacaatgcgtgcaatatcggcaaagtgatgatagattgtgcagtctgcagtaaattgaagaaatttgattgacgagacgaggcgaatcaggtttaatgcgccccgttgcccggatagctcagtcggtagagcaggggattgaaaatccccgtgtccttggttcgattccgagtccgggcaccactaattcttaagaacccgcccacaaggcgggtttttgcttttggatctgacaataaccttcacgaaaaaaattagcttataaagtctgggggaattactctcgccacgttaacgagagtaattttattgatattaatctcctgatactttacccccgtccaaactccagccgctgcacattcaccatcccaggcttctcagcagcactgacatcaatttgtgtcacccgcagcgcatagaacgccattttgaatttacgaacggacgcattatcagtgactttaacggcatgggcaaagtgaaatatcattttttaacgataaaaagagtgttatttcttgtgtatcagacaataagcattcattcaaaacctttagaaataatcaaaacacaggtattccactggttaatatattcacatatgaaatgaataaatattggaatatataaatattgaatattttgattaatccccgtactgattattcttcataatcagtacggggttgctacaacatgtattactttttcaccacaattaacggttcaatatcactctcttttttgatgaccagactttcatcaccgcgcaaacacgtcccaccgtagttgccgccaacggtgaaggtacatacctgaatgtatttaccgtccactttcggcaaacaccacagttgctgatagatgtttttctgctcggcaaatttaccgctggttttgtccagcacctcttcatgatggctgacgaggtcgatattgctgccacagcgaccggcgatcggtttcactgcgtaacctgttttcaccagttcatcattaacagtgaaatcggtatccagcaggtaacgatggtgcgggaacaggctccagaggatcggcagaatcgctttgttgccggggatcaccgtccacagcggctcaaagaccagcacttccgggcgcagcaatacgtcgataagacgcacttcgttttgcggatgaccggtacggattggcaccgcagcaaactcacggtcgctaacttcacgaatctgatcaaacgcggtttcccacgcccaggttttccacacgcagttaaccagtcgcccttccccatcaatcagttgcccggcagcatcccagcccagttcatccaatccacgcaagatacgcgtttcaaagcccgcctggtgcagcgcctgctccataaactgcgcgtgatagttttcctcgatatctttgtcctgcatgatatggacaaacggacgtgcacgactgtgtttccaggcaccagccaattcgttaatcagcccttccgccggattgaagccgttgcctttatagccctgctccgcccaacgttcgaggatcaagcccgcttcggtatgacaggaggcggagtcggcgttgtactcgtaaaccttcaggccacgctcatccatgcagaaatccatacgaccagtgatcatatggtgacggcgacgctgccaggagagacgcaaacgtggccagaggattttcgggatgtcgaacagcgccagcaggttgtcatctttcagcaccttgtcggttgcgtgaagatacatcaggtgcagctcgttggtggctttaattagctcctgctcggcactctcggtaatggtgtagtaatgataaggatcctgattgatcacctgaccgttggcctgcacataggcgttttgcagcggatctttttcatccagccatttaccgtcaaactggcctttgttttccaggcgcgctccgctgattttcagcagctcgcctgcaatttccggctgcggtaagctgtattcagtatcttccgtctggatcatccagcccagaatggtggtgtcatcaaaagtgtctttcagggtatagcagccgttttcgaccaccatctccagctcgcgcgtccactgttgcccttgcggcaacggggaatgaatcacgttctgttccgcaatacggactttgttgccatgcaattgggtaatgatggcgacatggccagtgtctttaaattcaccgcctttatcccagataagaagcgcacccgcgaccggcgcacgcgggctgccgttaggaaatgcctgcaatggcaggatgttgtcattaaccacttctcgcaggaagcgcaggctgaaaatctcccacgccatacccacgtcagtaaagaccacaccgtaattcagaaagagaaaacggcgagcaaattcaacgcattgccacttgtggcccatatattcgtcgtcgatatagctacggaatacggcgtcatcttcgtattcctgcggatcgagagaactgtaatcactagagtagattgctaccccacctggggcgtagcccaataatgtcccgaacggggcatcctggctggtcgttcctttgctcatcactttacctttaacaatacaacctaagcagttggcgtaattgttgtgctctgattacctgctcagcgacattaaccggacagaggtcagactaatcatacacctcatcgcagcggctggcgcaaagggttaaaaaattcacattctgtacagcaagtgacctgctacactgcttcaacactaccactcagaaggcaactcactatgacagacaatacttatcagcccgcgaaagtctggacgtgggataaatccgctggcggcgcgttcgccaatatcaatcgcccggtttctggtccgacgcatgaaaaaacgctgcccgttggcaaacacccattgcaactttatagcctgggaacgccgaacggtcagaaagtaacgattatgcttgaggagctgctggcgctgggcgttactggtgcagagtacgacgcctggctgattcgtattggcgatggcgatcaattctccagcggctttgtcgaagtgaacccaaacagcaagatcccggcgctgcgcgatcatacgcataatccgccgatccgcgtgtttgaatctggtagcatcctgctttatctggcggagaaatttggctacttcctgccgcaggatttggcaaagcgtactgaaacgatgaactggctgttctggttacagggcgcggcaccgttcctcggcggtggttttggtcacttttaccattacgcaccggtaaagattgagtacgccatcaaccgctttaccatggaagccaaacgtctgctcgacgtgctggataagcaactggcgcagcataagtttgttgcgggcgatgagtacaccattgcggatatggcgatttggccgtggtttggcaacgtggtgttaggtggtgtgtatgatgccgctgagtttcttgatgcgggcagttataagcatgtacaacgctgggcgaaagaagtaggcgaacgtccggcggtgaaacgtgggcgtattgttaaccgcaccaacggaccgctgaatgagcagttgcatgagcgccatgacgccagtgatttcgagacgaatacggaagataagcgtcaggggtaagggttggtgttcgtcgcagcaagccatccaggccggataaggcgttcacgccgcatccggcaatcgtgcacaatgcctgatgcgacgctgccgcgtcttatcaggcctacgaaagctaatcatcacgcgctggtaatgtcgtaatccatttggcgcagtgcgtctaatgtggctttggcttcatcttcgtcgatgatgctcatggcaaatccgacgtgtaccagcacccactggcccagtagatcggcagggttaccttcacaaatcagggcgatattcacatcgcgcttgataccacatacttcaacctgcgcaagctggtgaatatcttcaccgacagccagcacctggcctggaacgccaatacacattattaactccggttattcaacttcaatacttttgacgatcaggctatcgccggtatcgacacgcaaccgctcgccgtgacagagcggacactgcgcatcgtgctgatgaatctccaccacctggctgcaatcccagcaccaagcctgggcgggtttatagacgatatgtaaatcgcacccttgcgccaccgttccgtggcagacaatttcaaaactaaaacggacggcgctctcctcaacgcaggagagcgcgccaatttccagccacacggcggtgacgcgcttaacatcgtgctgctccgcctgccgttggataatttcaacggcgctctggcaaagagacaactcatgcattttcgccactcctgcgaccaaacagcagggcgcgacgccctgcgtgtggtacatccggattcgtgactggcaggctaaggatcattcgtgcgcagtcatccgtcaggcgttggccctcttcaatgctcatgctgtggctaagcgggctcatcaggctacaggagagatattggctaacaccgtccagttcgccaacggtaaaggtcatagtgccatacggcagttgcagaccaattttttcactcactttgcgcagcggccagagttgatccgggccggggaagataactgcactcagcatccacggggtgatcacacaccccgtccactgaccttcgaacagcgtaaaatcagaaacatacaccggcatactaggatgcagaaaagagagatcgtgcatgctacgccgggcaatttcttcaaacgctgcctgtacttgcgccttcggggaggtctggaaacctgctatctcttcagtcatgaatcgcctcccgtgggatggcttccacgccagattcacgcagcgcagccagaacctgctcaagcgcaggttcaatcattgcttcaaccgtcggcgttaagccgatgtgtggctccaggctttccgggatcacgccgaccagggtcagctttttcggaaactcgccggtgaagcgcagggcgctcaagacgtcggccaggccaagctgatgcggagagattttgttggtaaacaacgccggaacttcttcatcccgcaggatcatcatcgttcccggcgcgttctttttgctgacaatggcatccgcaataatcaaatgatcgcgatttgccatgtcgccaagcagctccattcccgccgtgccgccatcgaggatctcaacataatccggcagaatgtatcgttgctctaacgcttcgacaatccgcacaccgatggcttcatcggtcagcaaaatattgccgacccctaagactaaaatacgcattacagaaccttcacactaaccacttcgttgccgtcagcatccactacgtgtaccgcacaggccatgcacgggtcaaaggagtgaatggtacgcaccacttccagcggtttattcggatcggcaaccggtgtacccaccaggctctgctcgtaaggaccgacgtcatcattgaagttacgcggaccagagttccaggtacttggaacaaccgcctggtagttgctgatgataccgtctttaataaccatccagtgagagagcataccgcgcggcgcttcgaggaagccaacacctttgaattcacccgttgccggaatgttcggcttcacaaaggtggtgtgatcgcctttgccgatattggtgatcagtgcactgtattggttttgcaggatatcctgcaattcacagcagtgaacggtacgaccaataatacggcccagcgtggagtgcagctgtgccacttccagcgtgttgccagtcagtttctgataaatcgcaacgatttcattcagtttgttctgggtagattcgcgacctgccgccagtttcaccagcatattagccagtggccccacttctaccgttttgccgtagaaagtcggacttttcacccaggaatatttcccgtcgtcagaccaaccatcataagccggaatggtggtgccttcccacggtgcctgcggcgcttcgtctttataccaggagtgcttcgcgctttcctgaatgcctttgatcaggtattcatcggaatgagaagtgatcggacgatagctggacagatccgcattctcaatgtagccgcccgggaacaggaagctgccgtttttactgtcggtcgggaattccggcacgctcaggtagttcaccgcacctttaccgcgtgtcagccattccgggtagaacgcggcaataactgcggtatcaaccttataaacctgctcaacaaagtcgctcagtttgtcgatgaaagacttgatgtacatcaggcgctcaaggttcagcacgcccaaaccgtcgaggttgatcgggttcgcgacaccacctaccgccaggttctgaatgtgcggcgttttaccgcccagcagcgccacgacgcggttagcgtcacgctggcactccaacgcttgcaggtagtgcgctaccgcaatcaggttcacttccggcggcagtttcatcgccggatgaccccagtagccattagcgaaaatacccaactgaccgctggcaaccagatctttgatcttgttctgaactttggtgaactcttccggactgttcaggtgccaggtgctaacgcctttcagcatttcggaggctttggttgggtcagcttgcagtgcagaagtgatgtccacccagtccagcgcgctaagctgatagaaatgaacaatatggtcatgcgtggtgtgcgcagccagaatgatgttacggatgtattgcgcgttaaccggaacgtcgatattcagcgcactttctgccgcacgaacggaagacagcgcgtgagtggtagtacatacgccacagatacgttgcacaatcatccatgcatcgcgcggatcgcggtttttcacgatctcttccatgccgcgccacatggtaccggaagcccatgctttgctaacgacgccattttcgatttcgcaatcgatgcgtaaatgcccctcaatacgggttaccggatcaatagtaattctctggctcatgctttgctcgcctcatgacgattatgatcgttttgttttaaaggaggaagtatcggcagtagacgaatgagtacgatgtaagcgcaaatctcaatagccacaaaaccaatagaaatcaacagttcttcccaggtcgggaagtaggcgtaaccgccgcccgggttgaatgccaccaggctataggtcagacgccaggttgcacaacctaacagtgcgctcagtgcactcaggaacagcatgcgggaatcattacgcagcttcgccacacgcagaacgaccagcgggaagagcatcagcaggacttcaatccagaacatcacggagtagaagtcaccggcaaacgctaagctcagcttgtcgcgatagataagctcgccaaagcgcagcacgatgaaaatcgccagcaacacactgatggtgttggtcagcttaacaaacagactcttttcatccggaccgttgccacgcagacccgcctgcaccaggctaccttcaaagatgacaatgctgaagcccatgatgaacgccgtcagcaggctgaacagcggcaacatttcatagctctgccacaacggatgcaccttgtagcccgcgctgatcatcaggctccccatactagactggtgcatggtcggcagcagcgcaccgagcgcgatgatgaagaacatcaccttgtttagtcgctgtaggctcaccttccaccccagacgttcaaacagtgccggagcaaactccagtgccatcacgccgatatagatggtcatacagaccgccgtctcgaacagtacgctgttcacgttgaagtgacccggaatgtagaagtacggcaggttccagtagcgacccacgtcgatagtgatgctcaagccacccagactgtaaccaaacagactcgccaacagcgccggacgcaccagcggatggtattgcccacggttaaagacgtataccgcccacgccagcgcccagccgccacaggcaaagccggtgccaatcagcaggtcaaacgcgatccacacgccccacgggaagccgccgttcaggtcagagacagagcccagaccgaacaccagacgcttcacaatcaggagcatacagatgacgattaacggtccaaaaatcatgaccggtttactgatgattttgccgcccagcggttgtggatcatgactcatgatcgtctcctccgtcgtgattattcaactctcatgatcgtctcctccgtcgtgatggtcgtttttggtgttgcgacgaaccagcacggttaagcccgccagcacagccagtggtagcatcatgcctttatacagggtgtgttgaatattttcggaacgcgcaccggtagaaagatcgtccagtttcggcaggtcgagattttcataaggcacacccgtcagtaccagaacctgagtaccgccgccctctttctcgccgtacagatgcggataatatttcggcaccgtatgcaggtaagtgtcgccagatttcagcgtctgacgcggatagtggtattcgctgccaggcttcagcgccagacgttttttcgcctccgccatcagctcttcacgcgtaccgaaaatcaccgcgcccgccgggcacacttctacgcagccaggtagaccgcctttatcgagacgttccacacctttctggttgcacagctcgcacttatgcagcgcaccaaacgggttgttgtagtcgtacttcggcacgttgtacggacaggcgaccatgcagtaacggcagccggtgcacacatctttgtcgtaatggacaatgccggttttcggatcttttttcagtgcagagaccgggcacacagagacacagttcggatcgacgcagtgcatacactgtttcttaatgtacgcgtagccgttctcctcctggtctttgttgacccctgtgccgctggtccacacctgaatgatgttattggtatacgggctcagtttgtcgttgttgctccaggtctgttccccttgcgggttacgttcagggaaattgatatcctgacacttggtgacgcaagcctggcagcctacgcacaaggtgctgtcgtacaacatccccaggcttcccggaattggcgggcggttttcagcagccgcatgactgacagacggcagcgcgcccgtcagcaatgccccgcaggaggctgctttaataaaattacgtctgttcacggttattctccccgactgtcagcgttatctttcttttgctgacgacccagttcacgcaccgccatcacgctgacaccggcaaccaacccaaccacaccgccgagcaaaccaatagcgcctgcagagacgttgccgccctctttagcgttaacatccggtttctgactacgcggagtttgattttcgacgttggcaagctgatggatgcctttatggaagccgataccttcttcgttacagccatagcaagggtgaccaatcgccaccggccacacaccgccaacatcgcagaattgcagcgtactgcagttgccgtaagtttctggccctttacagccgaggtggtacaggcaccagccttcgcggtggccttcatcaccgaactctttggcaaaacgaccagcatcgaagtgcgggcgacgttcgcagtgttcgtgaatcagacggccataggcgaaggtcggacggtttttgtcatccagtttcggcggtttgccgtaagtgatgatgtgcgcaacggtcgcgaggaagttgtgcgggttcggcgggcagcccggaatattgataacggttttgcctggcagaacttcttgcaggctgactgcgccagttgggttaactccagctgcggcaacaccgccccacgcagagcaggaaccgatagcgataatggctgctgcgccttccgccgctttgcggatgtgatccacaatcggctcaccggcaaccatgcaataaataccgttatcttttaatgggatggaaccatccaccactaacacatactgccctttgtacttctcgagagcgttatgtttgttctcttcgacctgatgaccgaaggcggcggaaagcacttcgtgatactccagagagatagtctccagtacgaggttttctaccgttggatgcgttgcacgaagcagagattccgtacaaccggtgcactcctgcgcgccaatccagataactggcggacgctgcgggttagtaacgctttcggccatctctgcagcggctttgctacttaaccccatggtggcggctaatgctgcacaaagcttcatgaaatcacgacggttaatgccgtgagaatggatgagggtgttatctccagtcatttatagttattccgttgcgaagacctggcatatattttgcctcaatcgcaaaatcaataatgcgatcgatgcgccatttaccacacatttattatggttatcgatatcatgatactgcggcggggcgctaaaacgaagggaagaagcattagtgtaattaattaaagcaagataatacgtatgtttgatcaattttcgaggcgataaccggccataaaaaagcgcaacgtagaacaggaattattctcacgaaagaaatccattaccatctctttatccagtccatagcggcgcgtcagaatacccgcttcccaggcgctaagctggcgatctccggtcttttcgtacatccggtgactgtagcctaatacaaaaccgcgtttataatcggcacagaattttgtcacattaaccgcactgtcggcatgcgttgcttttaatcccgccattaagcctttaccaaaatggttattcatcgttcacctcattcgctatatattgtcatatatagcgatattttaggcaaagaacgacttttgcgcacgctattttttcatgcttgtttaagacgtaatcccgtaagagataaacctatcaggagagatatttatcgaaccatttcagtgtcctttgccaggcaagatcggcggcagatttgtcataacggggcgtggaatcattatggaatccgtgattaacccccggatagatatacgcctcataaaccttattattggctttcaacgccgcctcgtaagcaggccagccctcgttgattcgggtgtccagttccgcgaagtggagtagtaaaggcgcttcaatcttcgccacatcggcagtgggtgcctgacgaccataaaacggcaccgcgcaggccagttccggatacgcgacagccgccgcgttgcttacgccaccgccatagcaaaatccggtaatacccactttgcctgtcgcttgcggatagcgttgcataaactcaattgcggcaaagaaatcattcatcagtttgttggatcaacctgctgttgcagctcacgacctttatcatcatttcccggataacctccaacggaacttaagccgtcaggtgccagggcgatataccccgccttcgccactcgccgtgccacatcttcgatatacggattcagtccacgattctcatgcaccaccactacggctggcgttttgccgctcatctttgcgggcttcaccagataaccccgcacctcgccgtgaccatttgggctaggatacgtgatgtactcagcaacaatttccgggtcggtaaactctacctgagtcgccagcgcataatttggcttgagcaaatcaaacaacgctaatgccgtcatcccgcctaccgcacttcgccgcaaggttgaggaactcacgtttcgagattttcccgtgagcgtaatagtcatagtaatccagcaactcttgtgggaaatctttggcggttaaacgcggcatcgttgcactcctcagttggtgtttttttaagcaaagcataagcacgtatttttgcccagtttttcgtcactctgtgagccagactacgggatacgcgctggcgaatcgctaaactagaaacattgtttcgaaattgaacggtggaaaggagaggtcatggtctggttagcgaatcccgaacgttacgggcagatgcaataccgctattgcggaaaaagtggtttacgcctgcccgcgttaagcctcggtttatggcacaatttcggtcacgttaacgcgctggaaagtcagcgtgcgatcctgcgtaaagcgtttgatttgggcattacgcactttgatttagccaacaattacgggccgcctccaggaagcgcagaagagaactttggtcgcctgctgcgggaggattttgccgcttatcgcgatgaactgattatctctaccaaggctggctacgatatgtggcccggcccttacggctctggcggtagtcgtaaatacctgctcgccagcctcgaccaaagcctgaagcgtatggggcttgagtatgtcgatatcttttactctcatcgcgtcgatgaaaatacgccgatggaagaaaccgcctctgcgctggctcatgcggtacaaagcggtaaggcgctgtatgtcgggatctcctcttacagcccagagcggacgcaaaaaatggtcgagttgctgcgcgagtggaaaattccgctgttaattcatcaacctagctacaatttactgaaccgctgggtggataaaagcggcctgctggataccctgcaaaataacggcgtgggctgtattgcctttactcctctggctcagggattgctgaccggaaaatatctcaacggcattccgcaagatagtcggatgcatcgtgaagggaataaagttcgtggtctgacaccgaaaatgcttaccgaagccaacctcaacagcctgcgcttattgaatgaaatggcacagcagcgtggacaaagtatggcgcaaatggcgttaagctggttgctgaaagatgatcgcgtgacgagcgtattgattggtgccagccgcgcggagcaactagaggagaacgtgcaggcgctgaataatctgacatttagcaccaaggagctggcgcagattgatcagcatatcgccgatggcgagctgaatctgtggcaggcgtcttccgataaatgacctgttaataacgggcgcgcgaaccgcgcccgaatcagatcagtgattatgacgagtcagtcggtcaagatagcccatcacaaatgcagaaagcacaaacgtcagatggataatgacgtaccacatcagtttgttatccgggacatttttcgcatccataaagacgcgcagtaagtgaatggaagaaattgccacaatgctcgctgctactttgtttttcaggctcgttgcgtccattttccccagccagttcagcttctctttgttctcggagatatccagctgactgacgaaattctcataaccggaaaacatcaccatcaccagcaaaccgccaaccagcgtcatatccaccaggctcagcaacacgaggatcaaatcactttccgccatgctgaagatattcggcagtacgtgaataatctcctggaagaacttcagcgccagggcaactaacgccaggctaaggccaaagtacacgggggcaagcagccagcgagaagcatacattgcattttcaagaaaacgttccatacattcctgtcgtgtagttaaaacgggcaacagtatatcgcaattgagtaaacagcacgcaacagcaaatcaacatatacgttaaacctttgtcgcataattctgaggtttagggatcttcctggttcccttatcaacgcatcgagaacgtctacccttaaaggacgttgaacctgaagggagaaaaacgatgtctcatttaaaagacccgaccacgcagtattacactggtgaatatcccaaacagaaacaaccgacgccaggcatccaggcgaagatgacaccggtaccggattgcggcgagaaaacctatgttggtagcggtcgcctgaaagatcgtaaagcactggtgacagggggcgattccggaataggtcgcgctgccgccatcgcttacgcgcgtgaaggggctgacgtggcgatcagttatcttcccgtggaagaagaagacgctcaggatgtgaaaaagatcattgaagaatgcggacgcaaagccgttctgctgccaggcgatttaagcgatgagaaatttgcccgtagcctggttcacgaagcgcacaaggcgttaggcgggctggatattatggcgctggtcgccgggaaacaggttgccattccggatattgcagacctcaccagcgaacagtttcaaaagacctttgccattaacgttttcgcgctgttctggctaacccaggaagcgatccccctgctaccgaaaggtgcaagtatcatcaccactagcagtatccaggcataccagccaagtccgcatttactggactatgcggctacgaaggcggcgattctgaactacagccgtggcttggcaaaacaggtcgcggagaaaggtattcgggtgaatattgtcgcgccaggcccgatctggacagcactgcaaatttccggcggacaaacgcaggataagatcccgcagtttggtcagcaaacgccgatgaaacgtgcggggcaaccggcggaactggcccctgtatatgtttatctggcaagtcaggagagcagctacgtcaccgcagaagtgcacggcgtgtgcggcggcgagcatttaggttaaaaaaatgcccggttgtgaaaagcaaccgggcatcattgtgaattcactcttacctgatgtggcgaaaacgccttatccgcctacaaacgcatgaagattcaacatgttgcaatagattttgtaggcctgataagcgtagcgcatcaggcattgagcacctaatgccggatgcgtcgtgaacgccttatccggcctacaaacgcacgaagattcaacatgttgcaatagattttgtaggcctgatgagcgtagcgcatcaggcaattctactttacttcgctttggcggtttcttcgccgaccagacctatcttcaggtaacccgcctgatgcagcgtatccattaccttcatcaacgtctcgtaatcgacggttttgtccgctcggaagaagatggtggtgtctttcttgccttcggttaacgcattcaacgccgtaatcattgtttcatcggtgaccggatcgttaccgataaacatgctgttgtctgccttcacgctcagataaaccggtttttccgggcgcggctgcggcgtgctggtagaagcaggcaagttcaccttcacatctaccgtcgctaacggtgccgccaccataaagataatcagcagaaccaacatcacgtcgataaacggcgtcacgttgatatcatgcatttcgccgttatcgtcgaggttttcgttaagatgcattgccatcggatattatcctgcgcgtaatttttgtgcgacacgaaccggatgcgcagcggcgctggcttccagatccaggtcacggctttgcagcaacaatacctgcgctgcaacatcacccagcatcgctttaaagccgccaatctggcgtgcaaatacgttatagataacgaccgcaggaatcgctgccacgaggccgattgccgttgctaacagagcttctgcgatacccggcgcaacgactgccaggttagtggtctgcgtttgcgcgataccaataaagctgttcatgatgccccagaccgtaccaaacagaccaacgaacggagaaatcgcgccgatggttgccagatagccgttaccgcggcccatttgacgacccactgcggcgacccgacgctccagacggaagctggtacgttctttaataccttcgttatcgtcgctgccttcactcagttccagctcattctgcgcttcattgagcaaatgcaggcttaagcttttgctaccaaaatcagcggcgatatcgttggcctggtttaaggaacgcgcttcagccagcagttgctgctcgcgcttaaggcgacgcttctgattgaagaactctacgctcttactgaagaagattgcccaggtgactacggaggccaaaataagcccaatcatcacgcacttaacgacaatatcggcgtgctgatacataccccagacggaaaggtccgtctgcattaaattattacccactgtgtatctccaggacgcaagtcacaaaatctgcgcataataatatcaaaacgacgtcgaattgatagtcgttctcattactatttgcatactgccgtacctttgctttcttttccttgcgtttacgcagtaaaaaagtcaccagcacgccatttgcgaaaattttctgctttatgccaattcttcaggatgcgcccgcgaatattcatgctagtttagacatccagacgtataaaaacaggaatcccgacatggcggacaaaaagcttgatactcaactggtgaatgcaggacgcagcaaaaaatacactctcggcgcggtaaatagcgtgattcagcgcgcttctagcctggtctttgacagtgtagaagccaaaaaacacgcgacacgtaatcgcgccaatggagagttgttctatggacggcgcggaacgttaacccatttctccttacaacaagcgatgtgtgaactggaaggtggcgcaggctgcgtgctatttccctgcggggcggcagcggttgctaattccattcttgcttttatcgaacagggcgatcatgtgttgatgaccaacaccgcctatgaaccgagtcaggatttctgtagcaaaatcctcagcaaactgggcgtaacgacaagttggtttgatccgctgattggtgccgatatcgttaagcatctgcagccaaacactaaaatcgtgtttctggaaagcccaggctccatcaccatggaagtccacgacgttccggcgattgttgccgccgtacgcagtgtggtgccggatgccatcattatgatcgacaacacctgggcagccggtgtgctgtttaaggcgctggattttggcatcgatgtttctattcaagccgccaccaaatatctggttgggcatagtgatgcgatgattggcactgccgtgtgcaatgcccgttgctgggagcagctacgggaaaatgcctatctgatgggccagatggtcgatgccgataccgcctatataaccagccgtggcctgcgcacattaggtgtgcgtttgcgtcaacatcatgaaagcagtctgaaagtggctgaatggctggcagaacatccgcaagttgcgcgagttaaccaccctgctctgcctggcagtaaaggtcacgaattctggaaacgagactttacaggcagcagcgggctattttcctttgtgcttaagaaaaaactcaataatgaagagctggcgaactatctggataacttcagtttattcagcatggcctacagctggggcgggtatgaaagcttgatcctggcaaatcaaccagaacatatcgccgccattcgcccacaaggcgagatcgattttagcgggaccttgattcgcctgcatattggtctggaagatgtcgacgatctgattgccgatctggacgccggttttgcgcgaattgtataacattgccacttttggacaattttgcagacattttattgtgaaaagtcttaaattgttgcgtccgggatcaaggcgtcccggacgattcaggagtacaataggcagataaaggcttaaacgctgttccacaggaaagtccatggctgttattcaagatatcatcgctgcgctctggcaacacgactttgccgcgctggcggatcctcatattgttagcgttgtttactttgtcatgtttgccacgctgtttttagaaaacggcctgctgcccgccagttttttgccaggcgacagcttgttgatactggcaggcgcattgattgcccagggggttatggattttctgcctacgattgcgattctgaccgccgcagcaagtctgggctgctggctaagttatattcaggggcgctggttagggaataccaaaacggtgaaaggctggctggcacagcttcctgctaaatatcaccagcgcgccacctgcatgtttgaccgccacggtctgctggcgctgctggctggacgttttcttgcatttgtccgtacgctgctgccaaccatggcgggaatttccggtctgccaaaccgccgcttccagtttttcaactggttaagtggattgctgtgggtcagcgtggtaaccagttttggctatgccttaagtatgattccgttcgttaaacgccatgaagatcaggtaatgacgttcctgatgatcctgccaattgccttgttaaccgctggcttgttaggcacgctgtttgtggtgattaaaaaaaaatactgtaacgcctgacgattttccccgttcccggttgctgtaccgggaacgtatttaattcccctgcatcgcccgcattcttgccgcatcttcccccggcgtcacaccgaagtaacgtttaaactcacggctaaattggcttgcgctttcatagccgacgcgcatcgctgctgcgctggccttcatgccgtcatggatgatcatcatccgcgccttatgcagacggtaattcttcaaatactgcaacgggctggtactggtgacagacttaaaattatggtggaacgcgcttacgctcatgttggcttctgccgccagttgctcgacgctcaggttttcggtgtatttattctcaatccgtttcagcacgcggctaatcagactgaagtgagtctggcgactgaccagcgccagtaacgcgccgccgcaaggtccggtcagcacgtagtacagaatttcgcggatgatctgtttgccgagaatacgcgcatccagtggtcgctccatcacgtcgagtaaccgctccgccgcgcataaaatctcttcacttaacgtggcggagttaatcccgctggctgccatgctcggctggaaatgctcatcttcgccaatgtccatcaacagttcctgtaactgcaaaatatcgacattgagacgcaaccctgccagcggcacctcactcgtggcataggtttcgcactcaaacggcaacggcaccgtcagcagcaggtattcattggcatcataacgaaacacgcgttcattgatataaccgattttatgcccggaaaagagaattatgatgccaggctcgtacatcaccggtgtacgtgcgaaaggcgtctcgccatacaacaaacgcacatcgggcaacagtccactcaaactattttctttatttttcagtttattaactttatccgccagcaagcggcaaatctcttcacgtttcatatcgcgtaatttcttaggaataatgcggcaattactttgtgcgcaattttgtagcatttctccagcactctggagaaataggcaagacattggcagaaatgagcattgagagccagggcgctggcgatcacaatgaaaaacatcaggcagatcgttctctgccctcatattggcccagcaaagggagcaagtaatgaacaactttaatctgcacaccccaacccgcattctgtttggtaaaggcgcaatcgctggtttacgcgaacaaattcctcacgatgctcgcgtattgattacctacggcggcggcagcgtgaaaaaaaccggcgttctcgatcaagttctggatgccctgaaaggcatggacgtgctggaatttggcggtattgagccaaacccggcttatgaaacgctgatgaacgccgtgaaactggttcgcgaacagaaagtgactttcctgctggcggttggcggcggttctgtactggacggcaccaaatttatcgccgcagcggctaactatccggaaaatatcgatccgtggcacattctgcaaacgggcggtaaagagattaaaagcgccatcccgatgggctgtgtgctgacgctgccagcaaccggtagtgaatccaacgcaggcgcggtgatctcccgtaaaaccacaggcgacaagcaggcgttccattctgcccatgttcagccggtatttgccgtgctcgatccggtttatacctacaccctgccgccgcgtcaggtggctaacggcgtagtggacgcctttgtacacaccgtggaacagtatgttaccaaaccggttgatgccaaaattcaggaccgtttcgcagaaggcattttgctgacgctaatcgaagatggtccgaaagccctgaaagagccagaaaactacgatgtgcgcgccaacgtcatgtgggcggcgactcaggcgctgaacggtttgattggcgctggcgtaccgcaggactgggcaacgcatatgctgggccacgaactgactgcgatgcacggtctggatcacgcgcaaacactggctatcgtcctgcctgcactgtggaatgaaaaacgcgataccaagcgcgctaagctgctgcaatatgctgaacgcgtctggaacatcactgaaggttccgatgatgagcgtattgacgccgcgattgccgcaacccgcaatttctttgagcaattaggcgtgccgacccacctctccgactacggtctggacggcagctccatcccggctttgctgaaaaaactggaagagcacggcatgacccaactgggcgaaaatcatgacattacgttggatgtcagccgccgtatatacgaagccgcccgctaagctttttacgcctcaaactttcgttttcgggcatttcgtccagacttaagttcacaacacctcaccggagcctgctccggtgagttcatataaaggaggaacgtatggctaatccaaccgttattaagctacaggatggcaatgtcatgccccagctgggactgggcgtctggcaagcaagtaatgaggaagtaatcaccgccattcaaaaagcgttagaagtgggttatcgcagcattgataccgccgcggcctacaagaacgaagaaggtgtcggcaaagccctgaaaaatgccagtgtcaacagagaagaactgttcatcaccactaagctgtggaacgacgaccacaagcgcccccgcgaagccctgctcgacagcctgaaaaaactccagcttgattatatcgacctctacttaatgcactggcccgttcccgctatcgaccattatgtcgaagcatggaaaggcatgatcgaattgcaaaaagagggattaatcaaaagcatcggcgtgtgcaacttccagatccatcacctgcaacgcctgattgatgaaactggcgtgacgcctgtgataaaccagatcgaacttcatccgctgatgcaacaacgccagctacacgcctggaacgcgacacacaaaatccagaccgaatcctggagcccattagcgcaaggagggaaaggcgttttcgatcagaaagtcattcgcgatctggcagataaatacggcaaaaccccggcgcagattgttatccgctggcatctggatagcggcctggtggtgatcccgaaaagcgtcacacctagtcgtattgccgaaaactttgatgtctgggatttccgtctcgacaaagacgaactcggcgaaattgcaaaactcgatcagggcaagcgtctcggtcccgatcctgaccagttcggcggctaacatgcaaattctcccggtggcggtaatgttccgctaccggacttttcagaaatcatttattcccctcgcgtcccgcccgttgttactcttccttgttcaggaatgccaaatataaggacatcatcatgcagagccggaagctcttaaaagaacaactcatctatatccgggataaacgcaacggagaggtgaaaaacagatgaaaataatacttctgtttttagcagccctggcaagttttaccgtacacgcacagccccccagtcagaccgtagaacaaacagtccggcatatttatcagaactataaaagtgatgccactgccccttattttggtgaaaccggagagcgggcgataacttctgcgcgtattcaacaggcgcttaccctgaacgacaatcttacgctgccgggcaatattggctggctggattatgatccggtttgtgattgtcaggattttggcgatctggtgctagaaagcgttgcgataacccaaactgacgccgatcatgccgatgccgttgtgcgctttcgtatctttaaagatgataaagaaaagaccacgcagacactgaaaatggtggcggaaaatggtcgttgggtcattgacgatattgtcagcaatcatggcagcgtcttacaagcagttaatagcgagaatgaaaaaacgctggccgctttagctagcttgcaaaaagaacagccggaagcctttgttgccgaactctttgaacatattgctgattatagctggccgtggacgtgggtggtttccgactcttaccgccaggcggttaatgccttctataaaaccaccttcaagacggccaataatcccgatgaagatatgcaaatagaacggcaatttatttacgacaatccgatctgttttggcgaagagagcctatttagtcgcgttgatgaaattcgagtcctggagaaaaccgccgattccgcccgcattcatgttcgttttacgctgaccaatggcaacaacgaagagcaagaactggttttacagcggcgcgaaggcaagtgggaaatcgctgattttatccgcccgaacagcggcagcctacttaagcagattgaggcaaaaactgccgccagattaaagcaatgagctgaattaaataacaattagccggaacaataaataaaagggaacactatatgaaaacgattttcaccgtgggagctgttgttctggcaacctgcttgctcagtggctgcgtcaatgagcaaaaggtcaatcagctggcgagcaatgtgcaaacattaaatgccaaaatcgcccggcttgagcaggatatgaaagcactacgcccacaaatctatgctgccaaatccgaagctaacagagccaatacgcgtcttgatgctcaggactattttgattgcctgcgctgcttgcgtatgtacgcagaatgataaaaaaatccccggtagcgtgtcagttgccggggatattttttaacgtccaaccgccgctttaggccgtttcttcgcaccagcattcaccggacgagattgcgtagagctcgctttttttgccgtagcaggcgtctgacgctgggtcgccatcggcgtatgtttcgtcaacgccggacgggtattgcggttctggcgacgagcttcacgcatctcttcaatggttggcgcaggcactaagcaatcgcgacggctgccaatcagatgctttttgcccatcgcttccagcgcctggcggattaacggccagtttgccggatcgtggtaacgcaacaacgctttatgcaaacgacgctgtttgtcgcccttcggtacgaagacgtcttcgctcttataaccaatcttcgccagcgggtttttcccggtgtaatacatggtggtactgttcgccagcgggctcggatagaagttctgcacctggtcgaggcggaagcggtgctttttcagccacagcgccagattcaccatatcttcatcacgcgtaccggggtgcgcggagatgaaataggggatcagatactgctctttacctgcctgtttactgtaagtatcgaacagctctttaaagcggtcatagctgcccatgcccggcttcatcatcttgcttaacggcccttcttcggtatgttccggggcaatcttcagataaccgccgacgtgatgggtcgccagttctttgatatagcgcggatcttctacggctatgtcataacgcacaccagaggcaatcaggatctttttaatgcctttcagatcacgcgcacggcgatagaggttgatcgttggttcgtggttcgtgtccatgtgcggacaaatatccggataaacgcagctcaaacggcgacaagtttgttcagcgcgtgggcttttgcagcgcaacatatacatgttggcagttggcccaccaagatcggaaatcacgcccgtaaaacctggaacggtgtcgcggatcgcttcgatctcattaatgatgctatcttcggaacggctctgaataatgcgcccttcgtgctcggtgatagaacagaaagagcagccgccaaagcagccacgcataatgttgacgctaaaacggatcatttcgtaagccggaatacgggcattgccataggccggatgtggcacgcgcttgtatggcagcgcaaaaacgctgtccatctcttcggtagaaagcggaatagcaggcgggttgatccacacatagcggtcgccgtgtttttgcatcaatgcgcgggcacagcctgggttggtttcgtggtgcagaatacggctagcatgggcgtacagcactttatcgcccttcactttctcgaaagaaggcagcaacacgtaggttttttcccacggtttcgggcgcggtggctgcacggttacggctttggcttcctgctttttcggtgccaccggtttgttatccgcgcacggcaaatcttcaccatacggatgcgggattgggtcgatttttccaggggtatcaagacgggtggaatccacgccgctccagccaggcagcgcctctttcacgataatcgcggtattacgcacatcgcggatttcactaattggctcgcccatcgccagacgatgcgccacttccaccagcggacgctcaccgttaccaaacatcagcatgtcggctttgctatccaccagcacggaacggcgcacggtatcggaccagtaatcataatgcgcggtacggcgcagactagcctcaataccgccgaggatcaccggtacatctttccacgcctctttacaacgctgggtataaaccagtgtggcgcgatccgggcgcttacccgcgacgttatccggcgtgtaggcatcgtcatgacgtaaacggcgatcggcggtataacggttgatcatgctatccatgttgccagcagtaacaccgaaaaacagattcggtttacccagacgcataaagtcgtctttgctgctccagtccggctgggcgatgatcccgacgcgaaagccctgcgcttccagcatacgaccgcaaatcgccatcccgaagcttgggtgatcgacatacgcgtcgccagtaaccaaaatgatgtcgcagctatcccagccaagttgatccatctcttcacgagacatcggcaaaaacggtgccggtccaaaacaggcggcccagtactgcggccaggagaacaggtcgcgatccggttggatcagggagatagagctcattttgcttccagaaatgataaaaaaataatcaaaggccggggattataagccggaacgaaagagaaatcgaaaggtattccatactcgccctcctcgggcgagtatgaagattacggtaccggattgaccaacagttgcccaatgctgccacggtccgccatttccagcgtctgactgttgaagtagaacgggaagtgcgcccaggaaggctgaccgaaataaacaagcagctccacttgtccgtcaacccaaacggtatctttccagcctctgtcttccgggaacggcatcgcgccattcacgttacggatctggaacattacgccttcaatatggaacgcttgcggctcgtccgcgcgtaccgtccagcgttcccacgttccttgctgcgcggtgacatcaatacggttgacgtcccacagctgtccattaatacccgggtcatcacccagactgatatcgcgactgcgaattgggctaccagccatgatttcagttggcagcaagcgcatcggaagactgtctgtgaccagcggcagaaggccggttgggcgcagcgttagcaccagggtagaaaccagaatactggatggctcaaagaagccacgaatacgatcaacaatgctcgccgcttcgccacaggtgatgctcacttcatcgccgttgctcatatccaccagaatctcgcggcgctcgcccggtgccaggctaagttgcttcacgcttacaggagcaggcaggaatccctgatcgccagaaatcacatgtaacgggcgaccatcgttcatctgtagttgatagcgacgagagttgctcgcgttcagcagtcgcaagcgcacccagccacggctgacttcaacgtacgggctttgtacaccgttaaccagcagcgtatcaccaacaaagccgccgcttcccggttcgttgtattctggcgtaccaaagttatccagccgtttatcctggataatgaccggaaaatcatccacaccataatggttggggataggcaggctcttgctgacttcatcttccaccagccacattccggcaaggccgttatagacctgctgagccgtgcggttgggagtattggcgtgataccacagagtagctgcgttctggcgaatgggcagtacgggtgcccagtcagcgtttgggctcatcatccgtgccggaccgcccatcagcgggcctggtacctgtagcccggccaccgtcatactgacattttctgtcaggcggttgctgtaaataagcttaacatcgtcgcccttccagacgcggatagtcggccccaggtaacgaccattgattccccagacgctcgcgcgtgtccctggcgtaaaactccagtgcgcacgttgtacagtcataaacagcggttgcccacggcgagattcaagtagcggcggaacgggtagcggttgctgttgcccggctgcgctggccttcaggggaacagcgcctgcacaaagtgcaatcccgcttgcctgaatgaactgacgccgactgagactcatatttgctccatgtaaaactggctaaagtaataccgtgcaggaaagtgttccccgcaaaaatacagattgccgacttaaacttttccggcggcttcgcgttctgcgacttctttatcgagctcggcgattttttgttccattatgctacgacaatgggcagccagctcacgaacctgatctttgccatactgactgacgtcaattggcggcagcatttcgacaatcaccagaccgttgtgcagtcgattaagattaatcttattgctagttgtagagacgcacacgggaataatcgggacgcccgccgcaattgccgcgtgaaatgctccagtcttgaacggtagcaggccgcgaccacggctgcgggttccttccgggaacatccagatggaaatacggcgttttttgaagtgattcactacttccgcaatggtgccgtgagctttagtgcgattgtttctgtcgatcaataagttgccggttaaccagtacaactgcccgaagaaggggatccacagcaagctctttttacctaccgtcaccgtcggcggttgcacgatgttgcttgctgtcaccatgtcatagttgttctggtggttagcgatatagatagcattgccgtagctttcagcgtctgtaggtttacggcactcaactttcaggccaaacagcggcgcaagacggccaaacatatgcccaaaggtggccacatgtttcgggttacgcgggctgaaaaggcagtaaatggagccgaatacacagactaagatgctgtaaatcacggtaataataagacgaaagatatatagcataacaccctctgaaggtctgagagactggcattgtacgtcacctgaaatcaggttagggcattgttaaaagccgctctctggaaaagcgtattgttaatcgcaacgcatgaataaacaacggtttcaagggaatttttatcgtttccgggggttgaatacgctgccggatgacgacttaacgtttcatccggcgttccttgcaagcgggaggaaacagcgccctccccggcatattactcttcgctatcaccgctgctggcacggcgaggagagtcgatctcaacacgatcgatacgctgcaaaccgcgcatcaacgtaccgcggcgtccacgttcgccagtgactttctgtaactcttccgggcgcagtttaattttgcgtttcccaacatgaatggtcagcgtgctttgcggcggcagaacgtacaattgcgccagaccatcttctccacgcgcggcttctgcgcttggaatgttgataatcttgttgcctttgcccttgctcagctgcggcagatcacttaccgggaacatcaacatacggcctgcctgagtgattgccagcagcatatcggaagcatcttcaatcaccaccggcggcataacatgggcattttccggtaaggtgatcaaagccttacctgcacggttacgcgccaccagatcgttaaaggtgcagacgaaaccgtaacccgcatcggaagccatcagcagtttctgatcgtcgctttccatcagcatatggtcaacggtcgccccaggcggcaacgttaatttgccggtgagcggctcgccctgaccacgcgcgctcggcagcgtaatcgggtcaatggcatagctacgaccggtggaatcaacaaacactaccggttggttgctcttacctttcaccgccgctttgaagctatcacccgctttataattcaggcccggcgcgtcgatatcatggcctttagcgctgcgtacccagcccatctggctcagcacaatggtgacaggttcagacggcagcatgtcgtgctcgctcatcgctttcgcttcttcgcgttcctgcaacgggctacgacgatcgtcaccgtaggcttgcgcgtctgcctgcagttctttcttcagcaggttattcattttacgctcggaagccaaaatgccctgcaactggtcgcgctctttttccagttcactctgctcaccgcgaatcttcatctcttccagtttggcaagatgacgcagtttcagttcgaggatcgcttccgcctgggtttccgtaaggccaaaccggctcatcagcgccggtttcggttcatcttcattacgaatgatctcaatcacttcgtcgatattgagaaacgccaccagcaaaccttcgaggatatgcaggcgcttgaggactttctccagacgatagttcagtcggcggcgcacggtatcgcggcggaacaccagccattcggagaggatttccagcaggtttttcaccgccggacgaccatccagaccgatcatattaaggttaatacgatagctcttttccagatcggtggtagcgaagaggtggttcatcacctgatccatatccacgcggttggaacgcggcacaatcaccaggcgggtcgggttctcgtggtcagattcatcgcgcagatcgtcaaccatcggcagctttttgttgcgcatttgcgcagcaatttgctccagtacgcgcgcaccactaacctgatgcggcaatgcgctgataaccaccgcgccatcttctttcttccacaccgcgcgcatacgcacactaccacgtccgttctcgtagattttacggatctcggcgcggctagtgataatttccgcttcagtcggataatccggcccctgcacgatatccagcagctgatcgagcgtggttttcggctggtcgattaatgcgattgccgcctgagccacttcacgcaggttatgcggtggaatatcggtcgccatgccgacggcaataccggtggtgccgttaagcaaaatgtttggcagacgggcaggtagcattttcggctcctgcaaagtgccgtcgaagtttggcacccagtcagccgtcccctgccccagctcgctcaatagcagctcggaatatttgctcaaccgggattcggtgtaacgcattgccgcgaagcttttcggatcgtccggcgcgccccagttcccctgaccatcaaccagcggataacggtaagagaacggttgcgccatcaggaccatcgcttcataacaggcgctatcgccgtgcggatggtatttacccagtacgtcaccgacggtacgggcgctttttttaaatttggcgctggcattcaggcccagttcagacatcgcatacacaatgcggcgctgaacaggtttcagaccatcaccaataaacggcaacgcacggtccatgatcacgtacatggagtagtttaagtaggcgttttccgtaaattcatgtagcgcaaggcgctctgccatatcgctcattaattctgattcctcaacttattcgccagccttcaaaggggcaatattgccggagatactacattatctgccgcgtcgagtcacaggagatcaacgtgaatagcgccgccggacgtgctccgacggcgataaaggcatcaatgtgccttgatatacaactctttgctgtagacataatcctggggattatgcagcggaaaaccgccaacgtagggtttaagcagtttgattaacggctgatagtagataggaatcagcggtgcctgttggttgatgatcacttctgcctgctgatacaacgcattacgctttgtcgcatcagtgatctgcgtggcctggtttagtaaggcgtcatactgcgcatttttccagtgaccgacgttttcttcactatcgcttttgagcgtgttcaggaagctggaagcatcattgtacgtcgcatcccagctctgccgagacagcatgaaatcaccggctcgtcgggcatcaagataggttttccactccattgtgcgcagcgtcacctgtgcacccagccattttttccattcggaagacaacgctatcgcggtcttttcatgcagatcgtacttgttgtagaacagctcaaagcgtagcggatgagaggcgtcgtatcccgcctgtttcagcaaggcttttgccatcgcgacgcgctcactcattggcttttgcagttcatcgaacgtcgtcgcgctaaagccttttacctctggcggcgtcagcgtggttgcgggcgttctcaaccccagtaccttttgcgcaataagctgtcgatcaaccgtaagatatagcgcccgacgcactcgcacatcgttaaatggcggtttctcaaggttgaagttgtaatattcgctgttcagacgcggaataattcgtagctcgccaggcagacttttttcaatggcgggaatttgctgcgccggaacccaggtgagatcgacctctcccgcgcgatagcggttatagccggtgacgctattatctagcgccagatactcaacctgttgcaatactgtatgttgcgcatcgcggtactttggatttttgcgtgcagtaatcttttcgttaactacccactgatcaagcacaaaggcaccgttgtaaaccatgttctctggcttactccagctatcgccatgtttagcgatgacatgatgaggaaccgggaacagcgtcggccaggcgagcatcgtcgtgaaccaaggaaccggctgctcaagcgtaacttcaagagtacgatcatccgtcgctttgacacccaggcttgtaacatctgctttacccgcaacaatagctgcggcattgttaatgtgcgcctgtgccagatagccagcaaaagggcttgccgttttcgggtcaaccgcgcgctgccagccgaggacaaaatcctctgccgtcagaggctgaccgtcggaccactgcaaaccgctacgcagatggaaaatatagcgcttgccgccgtccagtatctcccagcgttcagcctgagcgggctgcacctggccttcaccgtccatccataccagaccttcaaacagatccagcacaatctgcgcggcagtattctcctccaccttttgcgggtcgagcgtacctgggtcgctatgattgttgtaacgaaagacttgttgcggggcgagcggtgtgttggcgggaacgtcagcagcgtagagaggagccgcacttaccaggctgaccagccataataaatttcgcgtatacatggtattccttaccggagaaattataagcccaacaacaatacgcctgtggcattgttcgctcaaacttatcgcgagtgatttggctcacactccggtaaagaaaaaagcgagttgcccccgcttttccattaattaacggatttcattcaatagttctggatgcttatccagaacacgtaaaagtttgattgtggaaggatgaggttgggcattgcctttttcgtaacggctaaacgcatttacacctcccccaaaaatttcgcttgcctctttttgggtaagagagagcttttttcgaaccttcactataaattcaggtgccactgtttcggcattcacgctagcccgaaatgcctttacttgcgccatgaaagcatcactctcttctttattcatgatgctctcttcgcaatggacacaatataaaccgtggatacctttcaatactgtttttcgtccacggaaggtgtatggaatatctttaatgccagaaaccatttctccctggtggcaaaccggacatttcatattacttctccttaaagctgacgatcagtacgtcatgaattaccgtaattttaagataaacctggcctgtaacaagcctgggtctgtaaacatcctgccagatagtatgatcagagtaggtggtcatgcttttataaaagtcgctctcacttaatccaatgataacattacacataccatcaaaatccaaacctaactcatctgcatttaacagggcactacgtgttgtacgaacttgcccggcattgacaagttttttaacctgactcaaacgtgtatgtggtgtgcgtttttccataacccccgcctccctgttactttagttataacctaaaaggttaattacagcaatgaaaaagcacctaaaaggttagttagatgtacggagatagtgaccacacaaaacgtattctttaaggaaagtgattgaccatataagaaagtggcgcattagtagcgccagtttgaagcaggaatttataagggaagctggagtcaggcatcacgccaacggcacataaacatccgtttccagtcgctgctctgtcaccccttcggcaagattggtgtagtgaaacagaatcggtgctttacgcattttctcgccgcttgcaggcagccagtggcgaatgatgccccataccgtgtgactaatatcgtccagctcgccaacgtggcgggccacggcataacgtccaccggtaagttcaccattgctcacaccataacgattatcgggaatcggttcgctaacgctgccgcagatatcaaagcgaaacgcttccggtgcggtggtggcagggtcgtcccaggcgacgccaaaagtctggctttggttaacaggagaaagccccgtctctttacgccacatgataaatttcgccacgctgtagttgagcaattcagggctacagcggtgcggcaacatcgccacaggtatacttgggaaatcgataatgtttacatccagtgtcaggtttgtcattttgcctccctgcgaaattattcccgggaacgcgtcccgggagcggtaacaattacggatttactttgcggatctgtttgacgtcaatttcaacagaattccagtctttatcgacttcaccctgaatctcaaccgtatctttcggcgtcaccgtcacgccgttccagcgtttgtggtcgatatcaacattgatagtaccgctggcatctttgaacacgtagagatcgtcagagatgcgttcaacgatattgccgcgcagggttacccaggtgtcgtcacgcagggattttgcgctttctacagtcgttacgctgccgttcggcccctggaatcctccggcctgactttgcgttgcgcttgggccagaaaaaccgccctgctctgctgccatcaccggtgcgctgcacagggccattactgcgattactgctgcgaattttttcatgtttattactccctttaatgtctgtttccgagcatttaacaagatagtccttaacaacttcttaagggaaaaaaataaaatttagtgctgtacagagcgcgttacaacacggtttactggcagcaaatacggttatcgcagggatgaaaaaatgcgaattttactgatagaagatgacatgctgattggcgacggcatcaaaacgggccttagtaaaatgggttttagcgtcgactggtttacacaaggtcgtcagggaaaagaggcgctttatagcgcaccttatgatgcggtgatcctggatttaaccttaccaggcatggatggtcgcgatattttgcgcgaatggcgagaaaaaggtcagcgtgagccggtactgatcctgaccgcgcgcgatgcgctggcggaacgtgtagaagggctgcgtctgggagctgacgattatctgtgtaaaccttttgcgttgatagaagtcgccgccaggctggaagctctgatgcgccgaaccaacggccaggccagcaacgagctgcgccacggtaacgtcatgctcgaccccggcaaacgtatcgccacgctggctggcgaacccttaacactgaaaccaaaagaatttgccctgctggaattactgatgcgtaacgctggtcgggtactgagccgcaaactgattgaagagaaactgtatacctgggacgaagaggtcaccagtaatgccgttgaagtgcatgtgcatcatctgcgacgcaaactcggtagtgattttattcgtaccgtgcatggtattggttacacattaggtgagaaatgaaatttacccaacgtcttagtctgcgcgtcaggctgacgctaatctttttaattctggccagcgtgacctggctgctttccagctttgtcgcctggaaacaaacaacggataacgtcgatgaattgttcgacacccaactgatgctgtttgccaagcggttaagtacgctcgatctcaacgaaatcaacgcggcggatcgcatggcacagacgccaaatagattaaaacacggtcatgttgatgacgatgcgctgacctttgccatctttacccacgacggcagaatggtccttaatgatggcgataacggagaagatattccctatagctatcaacgggaaggttttgctgacgggcaactggtcggtgaagacgatccttggcgttttgtctggatgaccagtcctgatggcaaatatcgcatcgttgttggccaggaatgggaataccgtgaagacatggcgctggcgattgttgccgggcaattgatcccgtggctggtcgcactgccgattatgttaatcatcatgatggtactactgggtcgtgaactcgcgccgctgaacaaactggcgctggcactacgtatgcgtgaccctgacagcgaaaaaccactaaacgcgactggcgtacccagcgaagtgcggccactggttgagagcctaaatcaactgttcgcccgcacacatgcgatgatggttcgtgaacgacgctttacctccgacgcagctcacgaacttcgtagcccgttaacggcgctgaaagtgcaaaccgaagttgcgcagctctctgacgatgatccgcaggcgcggaaaaaagcactgctccaattacattccgggatcgatcgcgctactcgtctggttgatcaactgctcacgctaagccggctggacagtctggataaccttcaggacgtcgcggagatcccgcttgaagatctcctgcaaagcagcgtgatggatatttaccacacggcgcagcaggcgaaaattgacgtgcgactgacactcaatgcccacagcatcaaacgcaccgggcaaccgctattgctaagtttgttggtgcgaaatttgctggataacgccgtgcgctacagtccacagggcagcgtggtagacgtcacgctgaatgctgataatttcatcgtgagggataacggccccggtgtgacaccagaggcactggcgcgaattggcgaacgcttctatcgcccacccggacaaaccgctaccggcagcgggcttgggctaagcattgtccagcgaatcgccaaattgcatggcatgaatgttgaatttgggaatgcggaacaaggtggatttgaggcgaaggtaagctggtaacttctctgtctatgagagccgttaaaacgactctcatagattttattaatagcaaaatataaaccgtccccaaaaaagccaccaaccacaaaccagacaaataccgaggctgaatacatatacccaaaactcgaacatttcccgcataaagagttttcttaagataagaataataagtggcgtaagaagaaaaaatgctgcaatcattgcttgcaatatacgatcttcgccactaacggaaggtatactgcaaatatttcctccgctctcaagcatccagtcatacttattgaaagcaaaaaaagaatctattaaccaataagtaagcattatatatagcaatgcttcaaatattgttttaattttctgctttaacatatatcagtacgctcataaaaatccatttataattatcaacatgacacgttgatactttcatcttttacttattcaaagccatattttcaatccccaaaaaaaccgaaccaaacgtgtaaattattccggtgcgagtaagaattatgaggaatggctatcagtattgtcattttcagaaaatatttatcctgcatcggtgagtcagagtaagatcagacttttgctaaattcgcaaaagactttgcacattttgctaatttcaccgtaccgctctgtgacgtactatagtcggcaaacgtctcaccttgaggttaaaaaatgagcaacatcctgattatcaacggcgcgaaaaaattcgcccactccaatggtcaactgaacgacaccctgaccgaagtcgcggatggcacactgcgcgaccttgggcatgatgtccgcatcgttcgcgccgacagcgactacgatgtcaaagcggaagtacaaaactttctctgggctgatgtggtgatctggcagatgccaggctggtggatgggcgcgccgtggacagtgaaaaaatacattgatgatgtattcaccgaaggtcacgggacgctgtatgccagcgatggtcgtacccgcaaagatccgagcaaaaaatacggttccggcggcctggtacagggcaaaaaatatatgctttctctgacctggaacgcaccaatggaagccttcaccgaaaaagatcagttcttccacggcgttggcgttgacggtgtgtatctgccgttccataaagcaaaccaattcctcggtatggaaccgctgccgacatttatcgctaatgacgtgataaaaatgcctgatgttccccgctatactgaagaatatcgcaagcatcttgtggaaatttttggttaactagagctcaggctttagaaggagttaaccatgcttaccgtaatcgcagaaatccgtactcgtcctggtcaacatcaccgtcaggcggtattggatcagtttgctaaaatcgttccaaccgtactgaaagaagaaggttgccacggctatgcgccaatggtggattgcgcagctggcgtgagtttccagtctatggcaccggattctatcgtgatgattgagcagtgggaaagcatcgcgcatcttgaagcgcatctgcaaaccccgcacatgaaggcgtatagcgaagccgtaaaaggtgacgtgctggagatgaatatccgtattctgcagccagggatttaatcctgccttgtttgcccggccatcctgaccgggcaatgttctttcctttaaacctcaatctccgccatgtcgcctttctcttgcaaccagttgcggcgatcttcgctgcgtttcttcgccagcagcatatccatcatcgcgtcagtacgctgatcgtcttcatcatcgatagtcaactgcaccagacggcgagtgttcggatcaagcgtggtttcgcgcaattgcatcgggttcatttcccccagacctttaaaacgctggacgttcggcttgcctttcttgcgttttaattgctcaagtacgccctctttctcttcttccgtcagcgcgtaataaacctctttcccgagatcaatacggtagagcggtggcagtgcgacgtaaacgtgaccgtgtttcaccaacgcgcggaaatgttttacgaacaaagcgcagagcagcgtggcaatgtgcagaccatcagagtccgcatccgcgaggatacagattttgccataacgaagctggctcagatcgtcgctgtcaggatcgataccgatcgctacgctaatatcgtgcacttcctggctagccagcacttcgtcggaagagacttcccaggtgttaaggatcttacctttcagtggcatgatcgcctgatattcgcgatcgcgcgcctgcttggcagatccgcctgcggagtcaccttccacaaggaacagctcggtacggttaaggtcctgcgcggtacaatcagccagtttgccaggcaacgccgggccgctggtcagctttttacgcaccacttttttggccgcacgcatacggcgctgggcgctggaaatcgccatctccgccagcagttcagccgcctgaacgttctggttcagccacaggataaaggcatctttcaccacgccagaaacgaatgccgcgcattgacggctagagagacgctctttcgtctgcccggcaaactgcggatcctgcatttttacactcagcacataggcgcagcgatcccagatatcttccgcgctcagctttacaccgcgcggcagaatattgcggtattcacagaactcacgcatcgcgtccaacaggccctgacgcagaccattaacatgggtaccgccctgcatcgttgggataaggttgacgtagctttcggtcagcagttcaccgccttccggcagccacagtagcgcccagtccacagcttcagtatcaccagcgaaattaccgataaacggtttttccggcagcgtcggcagaccatttaccgcttccgccaggtaatcattcagaccgtcctgatagcaccagcgttgttcggtattgttgatctcatctttaaaagtgatctcaacgccagggcacaataccgctttggctttcagcacatgcgtcaggcgactaacagaaaatcgcgggctgtcaaagaaggtttcatccggccagaagtgcacactggtaccagtattgcgtttaccgcaagtgccgacaacctgtaaatcctgcaccttttcgccattttcaaaggcgatgttataaacctgaccatcgcggcgcacgttaacttctacgcgcttgctcagggcgttaaccacgctaatccccacgccatgcaggccgccagagaactggtaatttttgttagagaatttaccgcctgcatgcagacggcaaagaatcagttcaaccgccggtacaccctcttccgggtgaatatccaccggcatcccgcgcccatcgtcaataacttctaagctctggtcagcatgtaaaataacgtccacgcgttttgcgtgacccgccagtgcttcatccacactgttatcaatgacttcttgccccaaatggttagggcgagtggtatcggtatacatccccggacggcggcgaaccggctcaagcccggtgagtacctcaatggcatcagcgttataagtttgcgtcatggtttaagttagtaattcgagttgatcgtcagagatggtgcagaccaagaaaatcgacgatcgggttgaaataatcttcgaagcccgtgaatgcgtggttgccgccttctatgacagtctggcggcaggaagcgtagtacgccaccgcctggcggtaatccagcacttcatctcccgtctgttgcagcagccagatcaaatccggcgcttccagcgggtcaatctgcatgactttaagatcgtaaatatggcgactctctagcacatattgctgcccggtgtaggggttctcgttctgaccgagatagtccgtcagcagttcaaacgggcgcaccgccgggtttaccaccactgcgggcagcataaaacattgactcaaccaggtggcgtaatatccccccagactgctaccgacaatacccaggctatcaccgccatgttccaggacaatggattccagcagctctgccgcgtcggaaggatacggcggcaactgcggaatgatcatctcaacgtcagggtgatgttccgccagccagttttttaacaagctcgcttttgcagagcgcgggctgctgttgaaaccgtgtaaataaagaagcgtagacatcagtagccttcactagcggtatcaggttggaaacgtgtgtccgccaggcgatgcacctcggtggtcagcgtgccatcagcatgtaactcgagagtacgccagccgggcgcgatggtatccagcgtaaagttggaacagtgcggcttaaactgcacacaggtgctcggcgttgccagcaggcggcgaccattccagtcgagatccagctcctgatgaatatgaccgcacagcaagtatttgacgtgcggaaacttcgccagcacggtatccagttcgcccgcgttacgcagactgtgttgatcgagccaactacaacccgcaggtagcggatgatgatgcagcagcagcaacgtatggcgttctggcgcatcggccagtttacgttccagccactcaagctgaaactcgctcagctcaccgtgcggcacgccaaacacctggctatccagcaacaggatttgccattgctcaccaataaacacgcgcttcgccggggagatacccgcatcctgtaacgcgctgtacatcgcgggctggaaatcgtggttgcccggcagccagacgcagggcgcacgaaaacttgcgatgccttcagcgaaatgctgataggccgcagaggattgatcctgcgctaaatcacctgtcgcgacaatcaggtcgaattcgtgctggtgtggccgaatcgcctccagcaccgcctggtaactctcccaggtgtttacccctaacagggcttcgtgcttttgtgcaaacaggtgagtgtcggtaatttgtaaaatcctgactctggcctcaccagccagaggaagggttaacaggctttccaaatggtgtccttaggtttcacgacgttaataaaccggaatcgccatcgctccatgtgctaaacagtatcgcaaccagtccgctaaaaactgattaatttgatgcttttcgtcgcgttgatgcaactttttattaggataatcataccgcgctttgaagcgaaaaatctgctggctactacacacttcagccaccatcgcgtcatgatacagacgcaccgtcatactcggaaggctccagtaactgatcgcgggcgcagtctgttctattgtcaccagggtagtgtatcgggtgctttccacaatcgtcagccgatattgtgcgtttgccacctgatagcttacagtttcgccgggtgcgtcattgcgcggtaacaaacggcgcaattgactaaagttcatctcgcacaggcgcatcatttcaggaaagtcaggtgtgtaacgcttcatttatgcccactcattttttaacgcttgatgatgcagctgcagccattgcaaagcgatgacgctcgctgcgttgtcgattttcccctcttctacccactggtatgcctgttcccggcttaccacatgaacgcgaatatcttcgttttcatcagccagaccgtgaataccgcttgcggtcgtggcgtccacttcgcccaccataatactgctacgctcactggtgccccccgggcttgccaggaaacttaacaccggtttggtccgtttgactatcagtcccgcctcttcaatcgcttcgcgacgggcaacatcttccacactttcaccctcttcaatcatcccggcaaccatctccagtagccaaggggtttcgctggtgtcgtacgcggcaatccgaatctgctcaatcagcacaacttcatcacgcactgggtcaaagggtagcaagactgcggcgtgaccgcgctcaaaaatttcccgccgcacctcatgactcatttgcccgttgaatagacgatgacgaaatctataaagatctaaactaaaaaagccgcgataaagtgtttctcgtgcaataatttctacatcgtttttgccaaatgtaacgggcaggttgtctggcttaagcattgttaatgtcctggcactaatagtgaattaaatgtgaatttcagcgacgtttgactgccgtttgagcagtcatgtgttaaattgaggcacattaacgccctatggcacgtaacgccaaccttttgcggtagcggcttctgctagaatccgcaataattttacagtttgatcgcgctaaatactgcttcaccacaaggaatgcaaatgaagaaattgctccccattcttatcggcctgagcctttctgggttcagtagcttgagccaggccgagaacctgatgcaagtttatcagcaagcacgccttagtaacccggaattgcgtaagtctgccgccgatcgtgatgctgcctttgaaaaaattaatgaagcgcgcagtccattactgccacagctaggtttaggtgcagattacacctatagcaacggctaccgcgacgcgaacggcatcaactctaacgcgaccagtgcgtccttgcagttaactcaatccatttttgatatgagcaaatggcgtgcgttaacgctgcaggaaaaagcagcagggattcaggacgtcacgtatcagaccgatcagcaaaccttgatcctcaacaccgcgaccgcttatttcaacgtgttgaatgctattgacgttctttcctatacacaggcacaaaaagaagcgatctaccgtcaattagatcaaaccacccaacgttttaacgtgggcctggtagcgatcaccgacgtgcagaacgcccgcgcacagtacgataccgtgctggcgaacgaagtgaccgcacgtaataaccttgataacgcggtagagcagctgcgccagatcaccggtaactactatccggaactggctgcgctgaatgtcgaaaactttaaaaccgacaaaccacagccggttaacgcgctgctgaaagaagccgaaaaacgcaacctgagcctgttacaggcacgcttgagccaggacctggcgcgcgagcaaattcgccaggcgcaggatggtcacttaccgactctggatttaacggcttctaccgggatttctgacacctcttatagcggtagcaaaacccgtggtgccgctggtacccagtatgacgatagcaatatgggccagaacaaagttggcctgagcttcagcctgccgatttatcagggcggaatggttaacagccaggtgaaacaggcacagtacaactttgtcggtgccagcgagcaactggaaagtgcccatcgtagcgtcgtgcagaccgtgcgttcctccttcaacaacattaatgcatctatcagtagcattaacgcctacaaacaagccgtagtttccgctcaaagcagtttagacgcgatggaagcgggctacagcgtcggtacgcgtaccattgttgatgtgttggatgcgaccaccacgttgtacaacgccaagcaagagctggcgaatgcgcgttataactacctgattaatcagctgaatattaagagtgctctgggtacgttgaacgagcaggatctgctggcactgaacaatgcgctgagcaaaccggtttccactaatccggaaaacgttgcaccgcaaacgccggaacagaatgctattgctgatggttatgcgcctgatagcccggcaccagtcgttcagcaaacatccgcacgcactaccaccagtaacggtcataaccctttccgtaactgatgacgacgacggggcttcggccccgtctgaacgtaaggcaacgtaaagatacgggttatctgccgcattcttcccccttcagccttcaatttcgaccagccatcctctattctgatgggtatttaccactggtcccggaagacaaaaatgaaacggacaaaatccatacgccacgcatcgttccgcaaaaactggagcgcacgccatctgacaccagtcgctctcgcggttgccactgtttttatgctggctggctgtgaaaagagtgatgaaacagtgtctctctatcaaaatgctgacgactgtagtgctgcaaacccaggcaaaagcgccgaatgtaccaccgcgtacaacaatgcgctgaaagaagccgaacgtactgcgccgaaatacgccacccgtgaagactgtgttgctgaatttggtgaaggtcagtgccagcaggcaccagcccaggctggcatggcaccagaaaaccaggcgcaggcccagcaatccagcgggagtttctggatgccgctgatggccggttacatgatggggcgtctgatgggcggcggcgcgggatttgcacagcagccgctgttctccagcaaaaacccagccagtccggcttacggtaaatataccgacgcgacgggtaaaaactatggcgcagcccagccaggccgcaccatgaccgtaccgaagacggcaatggcaccaaaaccggcgaccaccactaccgttacccgtggcggttttggtgaatctgttgccaaacaaagcactatgcagcgtagtgcaaccggtacctcttctcgtagtatgggtggctgataccgatggaaagagtcagtattaccgagcgcccggactggcgtgagaaagcccacgaatacggtttcaattttcacaccatgtacggcgagccgtactggtgtgaagatgcttactacaagttgaccctcgcccaggttgaaaagctggaagaagtcaccgccgaactgcaccagatgtgcctgaaagtggtggaaaaagtgatcgccagcgatgagctgatgaccaaattccgcattccaaaacacacctggagttttgtgcgccagagttggctgacgcaccagccaagcctttatagccgtcttgatctggcgtgggatggcactggtgaacctaaacttctggaaaataacgccgatacgccaacgagtctatacgaggcggcgttctttcagtggatctggctggaagatcagcttaacgccggtaacttgccggagggcagcgaccagtttaacagtctgcaagaaaaactgatcgatcgcttcgttgagctgcgtgaacagtatggcttccagttgctgcatctcacctgctgtcgcgacacggtggaagatcgcggaaccattcagtatttgcaggactgcgcaacggaagctgaaattgctactgagttcctctacatcgatgatatcgggttaggtgaaaaaggtcagttcacggatttacaggatcaggtaatttccaacctgttcaaactgtatccgtgggaatttatgttgcgtgagatgttcagtaccaagctggaggatgcaggcgtacgctggctggaaccggcgtggaagagcattatctccaacaaggcacttctaccgctactgtgggagatgttcccgaatcacccgaacctgctgcccgcttattttgcggaagatgatcatccgcaaatggaaaaatatgtggttaaaccgatcttctcccgtgaaggcgcaaacgtgagcatcattgagaacggcaaaaccattgaagcagcggaaggtccgtatggcgaagaagggatgattgttcagcaattccacccgttaccgaaattcggcgacagctatatgctgattggtagctggctggtgaacgatcaacccgccggaattggcattcgtgaagaccgtgcattgatcacccaggatatgtctcggttttatccacatatttttgttgaataagccacgataccggatggcactcgccatccggtaattgttagcctatctgcacgctcagcatactcaggctgcccatttctataccctcaaccggaatggtaattggctcctgcccatcccacgcacctaacacatacaacaacggcaaataatgctctggcgttgggttgcttaacgtgccaccttcatggtcgaggtaattcaccagaggatgttgttccactggcccttgccacgtcagattcgctttcacatactcattaaagctcgtcgcccacggatacggactactatcaccgtgccacttcactgtgcgcaggttatgcaccacgttaccgctggcgaccaacattattccttcatctcgcagcgctgccagtttgcgccccatttcgaaatgccaggcggcaggtttgctactgtcgatactcaactgcaccatcgggatatcagcgtcaggatacatcttaatcagcacgccccagctgccgtggtcaaagccccaggcttctttatccagcgtcaccgggatcggcgctaacagctcaaccagacgctgtgccagcgcagggctacccggagcaggataatgcgtatcgtacagcgcctgcgggaagccaccaaagtcatgaatcgtgggcggcgtctccatcgcggtcactcctgttccacgggtaaaccagtgagcgctaaccaccacaatcgcttgcgggcgtggcaatgtcatccccaacttctgccagctgcgggtatacaaattatcttccagcacgttcatcggactaccgtgacctaaaaacaatgctggcatacgtgtactagacatgatgatatccttaactaaaggtgtcattttgatatcctcacaatacgcttgttcggcggagtaagaacccggataacaatgatgatgatcatcagttattttgacgatctgcctgaaggtgaagatttataaggagttgtcgatgagtgtacctctcattctgaccatactggcgggggcagccacgtttattggcgcgtttctcggcgttctcgggcaaaaacccagcaaccgcttactggcgtttagcctaggttttgcggcggggatcatgttgctcatcagtttaatggaaatgcttcctgccgcactagcagctgaaggaatgagccctgtgttgggttatggaatgtttatcttcggtctgcttggctattttggcctggaccgcatgttgccacatgctcatccgcaggatttaatgcaaaaaagcgtgcagccgttgccaaaaagcatcaagcgcacagccattctgctcactctcggcatcagtctgcataacttcccggaagggattgccacctttgtcacggcgagcagcaacctggagctgggatttggcatcgcactggccgtcgcgttgcacaatatccctgaaggtctggcagtggcaggcccggtttatgcggcaacggggtctaaacgcaccgcgattctgtgggcggggatttctggactagcagaaattcttggtggtgtgctggcgtggttaatcctcggtagcatgatttccccggtggtcatggcggcaatcatggcggcggttgcaggaattatggtggcgctcagcgttgatgaattaatgccgctcgccaaagagattgaccctaataataaccccagctatggcgtactatgtggaatgagtgtgatgggattcagtttagtgctgctacaaacggcgggaattggttaaaaacaacatcagaagttgtccagcgcatggacaacttctgccagcttcacgaaagccttattctaccttttcggctgtctcttctctcgtactgtttaagtatttgttccgcgcttcaagcagtgcgtctctgtcctggcgaaacgcccgacaataacgtttcaaatgcaggaaataacccaccacaaccagagcaatcaatacaatccagtaccaggcgataaacatccttttacccttaatatttaacaatactaaacatttagcgtataaatttcacatatcctttttcggatatattcatatggtcgcataataacggaacaattatatgattttgatcataatgaaaaagaatgcctgatattaatgaaattttctcatagaaagagaagcggaattaacatcttgcatagcagggaaaaataaaaaccgaagcctgctacaacttcggtttcttgattaaggcagtaaattaagcagcggttttcagctggctttacgctcatgtgcctgacggtatgccaccaggtcttcaatagtcacgagcgccatattgtgtttattggcaaactcaatacactctggtgcacgcgccatcgtgccatcgtcattagtcagctcacacagtacaccagccggtttaaagcctgccagcgtcatcagatcaatagttgcttcagtatgaccgccacgcgtcagtacaccacctgcctgagcgcgaagtgggaaaacgtggccaggacgattcagatcactcggttttgcgccatcggcaatcgctgcgcgaacggtcgtaatacggtcagcggcagaaacaccggtagtcacaccttcagctgcttcaatggtcacggtaaaaccggtgccataggcgctggtgttattttctaccatcattggcagatcgagttgtttacggcgatcttcagtaatgcacaggcaaacaataccgctaccgtggcgaatggtcagcgccatctgctcaacagtcatggtttctgccgggaagatcatatcaccttcgttttcacggtcttcatcatcaagcaccattacaccgcgtccttcacgcagcgcagccagtgcattttcaacacgttcgaaaggcgtaccaaaagaggaaagtagcgtctgattcatggtaaaaaaacctcactaaaattatggttaccagaatcagggcagtcttaggagtggcggcatatagccaaaataacgtgagcgggtccatgcccgacagaatcgttactctctcccatccggactctaaccgtcggccccggaattacaccggatctgctgtcctttgagttcgcacccaaagcgctcgcgggctttcaactgagttgatttaccgccggtggggaatttcgccccgccctgagaataagcggattcactataacgctaatgattagcggcagcaacgcatagcttcacataattctggtttatatctaatacaaacactaaaacgggccatcaggcccgttatatcagtgctctaactccagctctcttgcctgcatcatctgttgacaataccaggcataacgtgcgcaaaaccaggttctatgttcttcatccatgttaccagtaacggccagaatatcgaccgggcgaccttctgcgtgcattctggcaaaactacgcgccaggaaatcgaaattatttaaagaattaagactatgatccataagcacatcctccggttatcgcataccttttaaggccatatgctttttctgatttcagtattccccaatcagtgtagtgcctttaaacataacgtgcgtaaatatattgtccccgatcacactttttagtgaaaaataaaaaaccatattaaaagactttctcttccagaacttctctaacctgtgttattattaacacagataaatgtaagcaaggaaactattacaaagtaaatattgcgtcactaaatggacattggagtgatatatgattttattcgccgactataacaccccttatcttttcgctatttcctttgtactgttgatcggcctgttagaaatttttgcgcttatctgcggtcacatgctctccggtgctcttgatgcacatcttgaccattatgattctataaccacaggtcatattagccaggcacttcattatctcaatattggaagattgccagctctcgtcgttctctgcttactggctggtttttttggtcttattggcatcctgttgcagcatgcctgcatcatggtctggcaaagtccactgagcaacctgttcgtggttcctgtcagtttactgtttacgattattgcggtgcattataccggtaaaatagttgcgccctggattccacgcgaccatagtagtgctattacagaagaagaatatattggtagcatggcgttaattaccggtcatcaagccactagtggtaatccctgcgaaggaaaactcaccgatcaatttggccaaatacattatttactactggagcctgaagaaggaaaaattttcactaaaggagacaaagtgttaattatttgccgactttctgcaacgcgatatttggcggaaaataatccctggccccaaatattgtaatttattaatcaaaaggaaatttaataatggatgatattgttaattctgtgccctcctggatgtttaccgcaattattgccgtatgcattctgtttattattggaattattttcgccaggctctatcgtcgcgctagcgcagagcaagcttttgttcgtactggtttaggtgggcaaaaagtggtaatgagcggtggcgcaatcgtgatgccgatctttcatgaaataatccccatcaatatgaatactctgaagctggaagtcagccgcagtaccattgatagcctgattacgaaagatcgtatgcgcgtcgatgtagtagtcgctttctttgtgcgggtaaaacctagtgtagaagggattgccaccgctgcccagacgctggggcaacgcaccctgagccctgaagacttacgtatgttggttgaagataaatttgtcgatgccctccgtgcaacagctgcgcaaatgaccatgcatgagttacaggatacccgcgagaactttgtgcagggggtgcaaaatacagtggcagaagacctgagcaaaaacggtctggaactggagagcgttagtcttaccaactttaaccagaccagcaaagaacatttcaatccgaacaatgcctttgacgccgaaggtttaaccaaactgactcaggaaacagagcgccgtcgccgcgaacgtaacgaagttgaacaggatgtagaagttgcggtgcgtgaaaaaaatcgcgatgcgctaagccgcaagctggagattgaacagcaagaagcgtttatgacgcttgagcaggagcagcaggttaaaacccgtactgccgaacagaatgcacgtattgcggcttttgaagctgaacgtcgtcgtgaagcagagcagacacgaattctggctgaacgacagattcaggaaacagaaatcgaccgcgaacaggccgtccgcagtagaaaggttgaagctgaacgtgaagttcgcattaaagagatcgaacagcagcaggtcaccgaaatcgctaaccagacgaaaagcatcgctattgccgccaaaagcgaacaacagtcccaggcagaagcgcgtgctaatctcgcacttgcagaagcggtaagcgcccaacaaaacgtagaaaccactcgccagactgccgaagccgatcgtgctaaacaagttgccctaatcgctgccgcgcaggatgcagaaaccaaagcggttgaactgaccgtgcgggcgaaagcagaaaaagaagccgcagagatgcaggcggcggctatcgttgagttagccgaagctacacgtaaaaagggtctggcggaagcagaagcacaacgtgcgctgaacgatgctatcaacgtactttctgatgaacaaaccagccttaaattcaaactggccttgttgcaggcgctgcctgcggtaatagagaaatccgttgagccgatgaagagtatcgacggtatcaagattattcaggtcgatggtctgaatcgtggcggcgctgcgggtgatgcaaacacgggtaatgtggggggcggaaacctggcggaacaagcattaagtgccgctctctcttaccgcacacaggcaccgctgattgactccttgctcaatgaaattggcgttagtggcggcagtctggcggcattgactagtcccttaaccagtacaactcccgtcgaagaaaaagcagagtaaaccctcttccaggaataatccctggcccaaaaagccggggattttttatatctgcgttccgctaaaaagtgcaaatgatcaggttgttgcagcattttgcgtgacggctcggggaaggcaaaactgcatcagagaaagcattgcgtggggtctggcgctcatcaacaatcggggagtcagcagggggctgaaacgggaaagcccctcccgaagaagggggccttacagaaggaaagggttatgatgaagctcgtcatcatactgattgtgttgttactcgtaagtttcgcagcttattaacagccaatcagaggggggagaaatcctccctcacccttgttcctttactttaggttgaaaaaaaatcagcgtcaagaaggtttcattaacacatatccctggcccaaaaagccggggattttttatatctgcgttccgctaaaaggtgcaaatgctcaggacgttgcagcgttttgcgtgaccgctcggggaaggcaaaattgcctctgggaaagcattgcgcggggtccggcgctcatcaacaatcggggggcagcaaggggctgaaacgggaaagcccctcccgaagaaggggccttgtataaggaaagggttatgatgaagctcgtcatcatactggttgtgttgttactgttaagtttcccgacttactaacaactcatcagaggggggagaaatcctcccttacccttgttcctttactctaggttgaaaaaacaacagcgtcaataggcctgccatgtacgaagcgagatctgtgaaccgctttccggttagccttttttatcctgttggatcttcttgatgatgttggtcgtgctgcaaccgtcttcaaagttgagcaccaacacttcgccaccgttggcccagacttctttactcccggcaatctcttctggtttatagtcgccgcctttcaccagcagatctggcaagatcccggcgatcaagcgctgcggcgtgtcctcttcaaagctcactacccagtcgaccgcttccagtgcgcccagcacaatcatacgctgttcgagtgggtttaccgggcgggaatcccctttcagccgtttggtggaggcatcgctgttgacggcaacaatcaagcggtcacccagcttgcgggcatttgccagataagagacgtgcccggcgtgcaggatgtcaaagacaccgttggtcatcaccactttttcaccacgtttacgcgctgccgctacggccagcttcagttcctcttcggtcatcacgccaaagcctgtatctgcacgtccacgtacagcattttccagctcgatcgggctaaccgtggaggttcccagtttgccgaccaccacgccagccgccgcattggcaaagaagcaggcttcttccaggctattacccgctgccagcgttgccgccaggacgccaatcaccgtgtcgcccgcaccggtaacgtcatacacttcctgcgcttgggttggcatatgcagcggcgctttacccggttgcagcaggctcataccctgttcggaacgggtcactaacagagcgctgagttcgtaatcggcaatcagtttcatgccgcgctcaacaatctcttcttcggtcttacatttaccgacaacagcttcaaattcgctgagattcggcgttaacagcgtagcgccgcggtagcgctcaaaatcggtaccttttggatcaatcagcaccggaacacccgctttacgcgccagttggatcatctgctgtacgcttgccagcgcacctttggcgtagtcagaaagcaccagcgcgccaatgctactcagcgcctgattaatccgctcgtgcagcggctgcggatcaacaccttcgaaaccttcttcaaaatccagacggatcagctgttggttgcgggaaagtacccgtaatttggtaatggtcggatgcgtcggtacagaaacgaagtcgcatttgacgttgacgtcggccagagatttactcagcgcgcgcgctgcatcgtcaatgcccgtcaacccgaccaggcgtgcattagcaccgagagaagcgatattcatcgccacgttagccgcgccgcccggacgttcttcgatggtattcactttaaccacgggcaccggcgcttccgggctgatacgactggtggggccgtaccagtaacgatccagcatcacatcaccaaccaccatcactcctgcacgttcaaactctggcagcgttactttcattcctgtctcctgagagattcaaaatttgcgcgcgataataccatacttcattcttccaccagccacttctgccagcttgcccgcaccagttcacgctctgcggtgaagcaatcctcgctcacatggcccggcaattcctgtaatgccagatgatgaagttcatcgcgaagcgtagtgtaagcacgggtcagcgccatcgcttcctgctcttccataatgtcgttttgcgccagtagttccagaatacgcacgttgtcactccagcgcgttaacttcggtttttcatgagcgtagcgcaacaccagatattgggtaataaattcgatatcggtaattcccccttcatcagctttgatatcaaagcgatcgcgatgtttattgccgagatgagcgcgcattttctcgcgcatttcccgcacttccgtttgcagagttttaccttcacgcggcagcgtcataatctcgcgacgcactgcgtcaaagtgcgcggtgagctgcggatcgccgtacactacacgcgcacgcaccagcgcctgatgttcccacgtccaggcctcgtttttctgataatcggcaaatgcttctgcggatgtcaccagcattcccgccgccccggacggacgcagtcgagcatccacttcatacaaaatgccggaagaggtacgcgtactgaacagatgcataatgcgttgcgccagacgcagataaaactgccgcccgtcgatttcccgctcaccgtcagtcatcgcatccattgggcaatcatggaggaagataaggtcaagatcggaactgtagcctaactcccagccgcccagcttgccgtagccgaccaccgcaaaaccacgcccttcgcgttcgttcaggtgattcggcttaccgtagcgggcaaccatttgaacccacgcctgctgaacgacggcatctatcatggcttccgccagccaggttaagtgatcgctcactttcatcaccggtagcgtaccggcgatatccgctgcggcgatgcgtaacagctgcgcctgtttgaactgacgcagcgcctcaagctgttgctcttcgtcatcttccggcacgcgcagcaaatactggcgcaactcatcgcggtaggcatcggtcgccgtcggctggtaaagggtgtttggatcgagcaattcatccagcaataatggataacgcgccagctggctggcaatcatcgggctcgcggcacacagagaaatcaaatgtttaagcgccgcggggaattcactgagcaattctaaataggtggtgcgggtaacaatccccaccagcaaggcggtaatgcggctcagcgtaacggcagcgtcttcacgcgcacagacatcacttagcagatgcggcatcagatggtcgagcacctgacgtcctcgcggcccgatggtgcgcttatccagctctttgcggaaatcggcaatcagcgttagcacctgtttgcgatcatcctcgctaagatgcgccagcactggcgtagtgtcatcttcctgcaacgcatcctgccacagctcacgccactgttcgctcaggctctcttcctgagtttcactttcatcgtcgccaatcaattcattaaacacccggcgcacattggtcatatgtgcggtcagcgccccggtcagttgcggccagtcagcaaagtccatcgcccacgccagccgcgcacgattaagctcatcagaaggaagcgtctgggtttgttcgtcgttaatgctttgcagcaggttttccagacgccgcaggaacagatacgccactcgcaattgttcagcatcgttttcagaaagcagatgcagctcggcaatggcgctgagcgttggcagtaaagagcggctttgcaggctcggttcgcgtccgccgcgaatgagctggaacacctgaacgataaattcaatttcgcgaatgccgcctgcgccgagtttgatattgtcggtcaaaccacgtcgacgcacttcacgggcaatcatccctttcatgttgcgcaggctctgaatcacgctgaaatcgatgtaacgacggaaaacaaacgggcgcagcatcgcacgcaactcgttagcatagacgccttcgctatcgcccataatccgcgccttgaccatcgcgtaacgctcccagtcgcgcccctgctcctggtaataatcttccaacgcggcaaagctcagcaccagcgggccactttcgccaaacggacgcagccgcatatccacgcgatagacgaagccatcctgcgttggttgatccagcactttaatcagccgctgccccatgcgggtaaaaaactgcgcgttatccagttcccggcgtccaccctgcgtacaaccatgttccggccaggcaaaaatcagatcgatatcagaggagaaattcagctccccaccgcccagcttacccatgcctaaaatcagcagcggttgcgcttcgccctgcgcattgcacggcgttccccactcgcggcagcaggcgtcatacagccagtcacgcgccgcaacaatcagcgtctccgccagatagctgagctgctgcaatatgctctcttcagtaaccagtgccagcgtttgcgcccaggcgatgcgcaccataatgcgccgccggaatagccgcagctcgcgcattaacccggcttcgtcactcacattacagagcgcctcctgcaaccatgccgcgtaatgctgccattcgtcggcctgcggcggttggctttccagttccgtcagccactctggatgcgcaatcacgctgtcctgcacaaaatcactaaaagtaagtacactcttcgcctgtgcgctaagactttcctcggctaaaggctctggcagccgctcaacaacggtctgccagtactgctgtaacggactagagagcggcttcataagcgattttatccttgcctgattaacgttttccgctgtgcaaccagaacggttcctgattgtttgcctcattacggaaatgttcaatttcgatgcgttgcccggtcgcaatagcgtgatgcagcccctgccagttctccagccaggcttgcgcgacgacaggatcatagtaacccgccagcaacagtatactgtcaatatcacgcgtcaggcgtggcaactggtcacggtagcgatcgcctaacggctggcagaaaacgcttttcagttcagcggcatggcgggaaagatggatatcggcaaagcgtttgaaggagtcgctgattttgccctgcgctttggcatctaaaaatggctgccatgctttgcttaccaaccattcggtcaacgccagcttcgccattgccgtttcggtagagtagaccgccgtcacggcagacaccgcagaagcaatggtcgcctcgcattgagtcagcagatcacgtaagtgagtgctcgctttacgcggcacaataccaccgaacagcatcagcgtatgacggaccaggctaatggctgccagcacctgttctttcgccgcatcgttgccgcgtacccacagttcttcatgatactgccattgcgctaacgccagctcgagcgccgcttccagcccctgttccacatcggcttttgccgcaacatgcaaaatggtggtcggtttgatttcacgcgccggattgccctgcgccagatgatagccacgcgccgctttgctcaggctgccctggcgtaatccggtttggcttaccagttggttcgccagtttcagcaccgcgcgcgtgtcgccgctaagcagttccagttccagctcacagataggttcagcaaattcacccgctttcacttccccctggtcgagggcgatttcaatttggctaccatcgaccgccaccagccatttttcgcgataaaaatcggtgctgaacagcggctgcacgcgggaggcgagatcggcgggcaattcgccgttcggccagacttccgtcggtaactgcgccaggtcgagcgtcggttcgctcaacgccacgttatattccgggcgctgatgtaagccgcctgtcactcttcctgcaactttcatggtcatctcatagcgaccgttttcgccacgaatacgtaagcccatatcgtgcccacgcagccagttatccggcgtttcgtagtaaatattcagcaactgcacggggtcatggtgctcgccgcccagcgtattgagatggtcacgcaacgcctcaacggcactgtgattaacaataaactttaattcgatttcctgagccatggcctttacttatcggttatgtcacataagtgacgatgaacggcgaacttaatgcgatcttttttgtcagtagatagtattttgcgccaaattgccatgcaacgggcaatttgacgggcgtaaaagtttgaagcagtggcaagacctgacacagaggattccgattgatgtcgaatgctttgcgtagcgacactgatgccactactatcgttccactttccatgacaataacgacagcctgatgccaaaattacgcctgatcggattaactttactcgcacttagcgcgactgccgtcagtcacgctgaagaaacgcgctatgtttccgacgaactgaatacctgggtccgcagcggtccgggagatcattatcgcctcgtgggcacggttaacgccggcgaggaagtgaccttattacaaactgacgccaacaccaattatgcccaggtgaaagacagctctggccgtaccgcctggatcccgttgaaacaacttagcactgagccaagcctgcgctcccgtgtgccagatctggaaaatcaggtcaaaaccctgaccgataaactcaccaatatcgataacacctggaatcagcgcaccgcagaaatgcagcaaaaagtggcgcagagcgacagcgtgatcaacgggttaaaagaagaaaatcagaaactgaaaaacgagctgattgtcgcgcagaaaaaggtcgatgccgccagcgtacagctggatgacaaacagcgcaccatcatcatgcaatggtttatgtatggcggtggcgtgctggggcttggcttgctgctcggtctggtactgccgcacctgatcccaagccgcaaacgcaaagatcgctggatgaactaaatcgccttcttcgttgcactgtcttattattaggaattgtgtatttgacgaagggatgatggcgtgaagatttatctggtcggtggtgctgttcgggatgcattgttagggctaccggtcaaagacagagattgggtggtggtcggcagtacgccacaggagatgctcgacgcgggctaccagcaggtaggccgcgattttcctgtgtttctgcatccgcaaacgcatgaagagtatgcgctggcacgtaccgaacggaaatccggttccggttacaccggttttacttgctatgccgcaccggatgtcacgctggaagatgatcttaagcgtcgcgatctgaccattaatgcgctggcccaggacgataacggcgagattatcgacccgtacaacggtctgggcgatctgcaaaatcgtctgttgcgccatgtttcccccgcttttggcgaagatccgttacgcgtattgcgcgtggcgcgttttgctgcgcgttatgcccacctcggttttcgtattgccgatgaaactctggcgttgatgcgcgagatgacccatgcgggtgaactggaacacctgacgcctgaacgggtatggaaagagacggaaagcgccctcaccacccgcaatccacaggtgttcttccaggtactgcgcgattgcggcgcactgcgcgttttattcccggaaattgacgcactgtttggcgttccggcccctgccaagtggcatccggaaatcgatacgggtattcataccttaatgacgctcagtatggcggcgatgctgagtccgcaggtcgatgtccgtttcgcaactttatgccacgatctcggtaaagggctgacgccgccagaactctggccgcgtcatcatggtcatggcccggcgggtgttaagttagtggaacaactatgccagcgtctgcgcgtgccaaatgaaattcgcgatttagccagactggtggctgagtttcacgatctcatccacaccttcccaatgctgaacccaaaaaccatcgtcaaattatttgattccatcgatgcctggcgtaaaccgcagcgtgtcgagcaactggcgctgaccagcgaggctgacgtgcgcggcagaaccggttttgaaagtgcggactacccgcaaggccgctggttgcgcgaagcctgggaagtggcgcagagtgtgccgacaaaagccgtcgttgaagcgggatttaaaggtgtggagattcgcgaggagctgacccgacggcggattgcggcggtagccagctggaaggaacaacgttgcccaaagcctgaatgagtattgggcattttgccggatgcggcgtaaacgccttatccggctacatgtcaacgacagttgtaggcctgataagacgcgcaagcgtcgcatcaggcgttgattgccggatgcggcgtgaacgccttattcggcctacgcaatcgttgacaacgccaagcatccgacactattcctcaattaaaagaacacgacatacaccgcagccgccacaataaagcgataaatggcgaacgggataaagctaatgcgcttaatcaattgcaggaaggttttaatcgctatcagcgccaccacaaaagcggtgataaacccaacggcaaacatcgggatatcgccgcttgtcaggaagccccagcttttgtagagatcgagcgccgttgcgcccatcatcatcggcaccgccagcaggaagctaaactcggaagcagcgtaacggctcacccccatcagcatcccaccactaatggtcgccccggaacgggagaaacccggccacagcgccagacactggaaacagccaatcataaatgcctgacgataggtcatatcatcaagacccggcgcacgcggctctttcggcttcaggcattcggcggcaatcagcaacaaaccgccaacgaccagcgcatacatcacatttatcgggttaaacaaactcttaatcgtgtcgtggaacaacagccccaataccaccgccggaatcatccccagcaaaatgtggatcagcgttaaacgacctttgctttcaccttcgtgctgcaacgggcggccaaagtggatgccaatcaggccaaacagacgccgccagaacatcactactaccgccagaatacttcctaactggatcacaacttcaaaggttttcgccgtgtcgccctcaaaccccaacaagtgaccgacaataatcatatggcccgtgctggataccggcagaaattctgtcaatccttcgaccacacccaatattgccgctatcagcaggctgtgcatatcgctcatcaataaacccctaaattattaaaatgtaccgcttgtccgaactactgcgtatgaccaggttataaccgtttggtttaacagctgtaaaattaattattttctttcagattattgccacgctcaatgattacgccaacattcgccgcccgcgccactgcgcctggcttgctgagtttgatacgcacccacgggctgttgaagcgtgctaacagcagctccgccacctcttcagccacgcgttccaccagcgcaaaacgcgccccctcgacgtggctgaccaccgtttctgcaatgtcagcgtaactgaggcaatccgccacatcatcacttttcgccgctttacggttatcccacgccatttcgatatcgaacactaacttctgttcgatggtctgttcccagtcgtaaacaccaatagtggtgattacgctaagttgctctataaatacaatatccatcacgtcctgcctgctttttggctaaccggataccacttccggcgaaatgtgcgtattatccacagattcatcgttgaacacgaattttcaaaacggaacagcttatgagtgcaatcgcgcctggaatgatcctcatcgcgtacctctgcggctccatttccagtgccattctggtttgccgcttgtgtgggctgcccgatccgcgaaccagcggctccggcaatccaggcgcaaccaatgtgttacgtatcggtggcaagggagcagccgtagcagtactgattttcgacgttctgaaaggaatgttgcccgtctggggcgcgtatgaattaggtgtcagccccttctggctaggcttaattgccatcgccgcctgtcttggacacatctggcccgttttcttcggatttaaaggaggaaaaggcgttgctaccgcttttggtgccatcgcacccattggctgggatctcaccggagtaatggcgggaacctggttactgaccgtgctattgagcggatacagcagcctgggagcgattgtcagtgcactgattgctccgttttatgtctggtggtttaagccacaattcaccttcccggttagcatgctctcttgcctgatcctgctgcgtcatcatgacaacatccaacgtctgtggcgtcgtcaggagacaaaaatctggacgaaattcaaaagaaagcgcgaaaaggatcccgagtgatttctggtggatttacatgacctgatagccttcatcgggcttgcccagccgttgctggcaccatgccgccagaaattccacgcagacacgtaatttcatgctgcgatagagcggctcccggtaaacagcccagatattggcgctttgtgcatactctggcaatacttgcaccagtttgccactctccagaaacggcaacacatcccactcggaacgcagcataatccctttgccctccagcgcccattgcagcacaatctcgccgctattggaggaaagatgcccgcttaccttcacgctttttttctcctgaccgttccccaactcccatattccatgggtcatatcgcgctctttggtcaccagacagtcatgacgacttaattcctgtagggattgtggctgcggatatttttgcagatactcaggtgctgcgcataatattcttttattttttgtcaaaagatgcgcaatataataatcaggaatttcgtcattaatacgaatatccagatcaatattatcctgcactaaatcaatttgccgatcgaacaattcaaaatgcacctgtaactcaggataattgcgcatcagttcggtaatagctggcgcaatatggctgcgcccaaaaccaaaactgcaaccaatacgaatcatcccctccgggcgcgttttgatttgcgtgacgtcatcgaccagtcgctgatattgggtgaggatttccaacgcatgttcgtaacaacgttggccactttcagtcagcgccacgccgcgagcggagcggttcagcagcgttgttgccagcgtattttcaaggatttggatccgcttggtgacaaatgcaggcgtctgcccaagcgtcgccgctgcggcgctaaaactcccgctgtgaacgatttctaccagtacctgcaagtctttggctaaaggccagctattcagcatcgttaattatccgcagttgtgataagcgcagtgtatttcgcaaaacattgccattccctgctctggcgcaatattcattcttattttcgcgttgattcacgaactgttaattacatattcacggtggcaaaaaatataaaaccacatttttagtggtagtttgtggcggtgaatttttccagacaaatacaaaaactggagttgccatgatgagcgaaagtaataagcaacaggcagtgaataagttgacagagattgtcgctaactttaccgccatgatttctacccgaatgcctgatgacgtggtggataaactaaaacagctaaaggatgccgaaacgagcagcatggggaaaattatctaccatacgatgttcgacaacatgcaaaaagcgattgacctgaatcgtcctgcctgtcaggacaccggggagattatgttcttcgttaaagtcggttcccgcttcccactgcttggcgagctgcaaagcatactcaaacaagccgtggaagaggcaaccgtcaaagcgccactacgtcacaatgcggtagaaatttttgacgaagtaaacaccggcaaaaataccggtagcggcgtaccgtgggtcacctgggacatcatccccgacaatgacgatgcggaaatcgaagtttacatggcaggcggcggctgcacgctacctggccgcagcaaagtgttaatgccgagtgaaggctacgaaggcgtggtgaaattcgtcttcgaaaatatctccaccctcgccgtaaacgcctgtccaccggtactggtgggcgtgggcatcgccaccagcgtggaaaccgccgccgtactcagccgtaaagccattttgcgcccgattggcagccgccatcccaatccaaaagcggcagaactggagctacgcctggaagaaggactcaaccgtctggggattggtccacaagggctgaccggcaacagtagtgtgatgggcgtacatatcgaatctgccgcccgccatccgagtaccatcggcgttgctgtctctaccggctgctgggcgcatcgtcgcggcacgctgctggttcatgccgatctcacctttgaaaatctgtctcacacccggagcgcgttatgaaaaagatcctgacaaccccgatcaaagctgaagatctgcaagatattcgcgtcggcgatgtgatctacctgaccggtacgctggtgacctgccgcgacgtttgtcaccgccgtttgatcgaactgaaacgtccgatcccttacgatctcaacggcaaagcgattttccacgctggccccatcgtgcgcaaaaacggcgacaaatgggagatggtctccgtcggcccgacaaccagtatgcgtatggaaagttttgaacgtgaatttattgagcagaccggcgtgaaactggtggttggcaaaggtggtatggggccgctgaccgaagaaggctgccagaaattcaaggcgctacatgtgattttcccggcaggctgcgcggtgctggcggcaacccaggtggaagagattgaagaagtgcactggacagagctcggaatgccggagagtctgtgggtctgccgggtcaaagagttcggcccgctgattgtctctattgatacccacggcaacaacctgatagccgaaaacaaaaagctgttcgccgaacgccgcgatcccatcgtggaagagatctgcgagcacgtccattacatcaaataaccctcccggagaggctcacccctctcctttttcgcaggcataacacgatgaaaccttccactgaatggtggcgatatcttgcgccgctggcggtcatcgccattattgctctacttccggttcccgcagggctggagaaccatacctggctctactttgccgtttttactggcgtgatcgttggactgatcctcgaacccgtgccgggtgccgtggtggcgatggtgggtatatccatcatcgccatactctctccctggctgctgttcagcccggagcagctcgctcagccaggctttaaattcactgcaaaatccctcagctgggccgtttccggtttttctaatagcgttatctggctgattttcgccgcctttatgtttggcacaggctatgaaaaaaccgggcttggacgccgcattgcgctgattctggtgaaaaagatgggacatcgcacgctgtttctcggctatgcggtgatgttctccgagctgatcctcgcacctgtaacaccgtccaacagcgcgcgtggtgcggggattatctatcccatcatccgtaacctgccaccgctctatcaaagtcaaccaaacgacagcagtagccgcagcattggcagctacatcatgtggatggggattgttgccgactgcgtgaccagcgccattttcttgacggcgatggcaccaaacttgctgttaattggactgatgaaaagcgcatctcacgccacgctgagttggggcgactggttcctcgggatgttgccgctcagcattttactggttctgctggttccctggctggcttacgtgctgtacccgccggtactgaagtctggcgatcaggtgccgcgctgggcagagacggaactgcaggcaatgggcccgctctgtagccgtgaaaaacggatgctggggctgatggtaggcgcgctggtgctgtggattttcggcggtgattatatcgatgccgcgatggtcggttacagcgtggtggcactgatgctgcttctgcgcattatcagttgggacgacattgtcagtaataaagcggcgtggaacgttttcttctggctggccagccttatcaccctcgccaccggactcaacaacaccggttttattagctggtttggcaaactgttagcaggcagcttaagcggttatagcccaacgatggtgatggtggcgttgattgtggtgttttatctactgcgctactttttcgccagcgccacggcgtatacctccgctctcgcaccgatgatgattgctgctgcgctggcgatgccggaaatcccgctgccggtgttctgcctgatggttggtgcggcaattggtctggggagcattcttacaccatacgccaccggccccagtccgatttactacggcagtggttatctgccaacggcggattactggcgactgggggcgatttttgggctgatattcctcgtattgctggtgattaccggcttactgtggatgcccgtggtgttgctttaagtgaggacggtgccggaaattgctctccggcacccaatagttttacgcagccggtaactccgccagcggccagcgcggacgcacgctaacgccgagatccgccgtcgcgcctgctttaaaccgcaccattccggcataggcgatcatcgcgccgttatcagtacaaaattccggacgcgcgtagaacacttcgccgcggcgttttttcatcatttcagccagcttcgcccgtaacgtacggttagcactcacgccgcccgccatgaccagtcgcttaaagcccgtctgatccagcgcccgcttgcacttaatcatcagcgtatcgaccaccgcatcttcaaaggcgcgggcgatatcagcacgcgtctggtcgtcggtgccgttgtcacgaatggtatttgccgcgaaggttttcaggccggagaagctgaaatccagccccggacggtcggtcatcggacgcgggaagacaaagcgcccggcagtaccctgagccgccattttgctcagtaacggcccgccaggataatccagccccagcagcttcgcggttttatcaaacgcttccccggcggcatcatcgatagactcgccgagcagctcgtactgaccaatgccagtcacgctgattaactgcgtatgaccgccggaaacaagcagcgcaacaaacggaaattccggcgggttatcttccagcatcggcgctaacagatgcccttccatatggtgtacagggatcgccggaacgtcccaggcaaacgccagagaacgccccacggtcgcgccaaccagtagcgcgccgactaatccagggcctgcggtataggccacagcatcaatgtcttttgccgttaaaccagactcctttagcgccgcctggatcaacggtacggttttacgcacatgatcgcgggaggccagttcaggcacgacgccgccgtagtcagcgtgcaatttcacctgactatacaattggttggctaacaaacctttttcatcgtcgtaaatggcgatgccggtttcatcgcaggaagtttcaatacccagtacacgcatgacttgttttacctcgctttattaccgcgcagtgtaggaccaatgcgggttgatgtaaaactttgttcgcccctggagaaagcctcgtgtatactcctcacccttataaaagtccctttcaaaaaaggccgcggtgctttacaaagcagcagcaattgcagtaaaattccgcaccattttgaaataagctggcgttgatgccagcggcaaaccgaattaatcaaaggtgagaggcacatgccggtaattaaagtacgtgaaaacgagccgttcgacgtagctctgcgtcgcttcaagcgttcctgcgaaaaagcaggtgttctggcggaagttcgtcgtcgtgagttctatgaaaaaccgactaccgaacgtaagcgcgctaaagcttctgcagtgaaacgtcacgcgaagaaactggctcgcgaaaacgcacgccgcactcgtctgtactaattccccgagagcgttgctctccgatcagaccgagttgtagttgtaaggccgtgcttccgaaaggaatgcgcggcttattttcgtttatgaattgctaaaaatcggggcctatggctggacgaatcccacgcgtattcattaatgatctgctggcacgcactgacatcgtcgatctgatcgatgcccgtgtgaagctgaaaaagcagggcaagaatttccacgcgtgttgtccattccacaacgagaaaaccccgtccttcaccgttaacggtgagaaacagttttaccactgctttggatgtggcgcgcacggcaacgcgatcgacttcctgatgaactacgacaagctcgagttcgtcgaaacggtcgaagagctggcagcaatgcacaatcttgaagtgccatttgaagcaggcagcggccccagccagatcgagcgccatcagaggcaaacgctttatcagttgatggacggtctgaatacgttttaccaacaatctttacaacaacctgttgccacgtctgcgcgccagtatctggaaaaacgcggattaagccacgaggttatcgctcgctttgcgattggttttgcgccccccggctgggacaacgtcctgaagcggtttggcggcaatccagaaaatcgccagagtttgattgatgcggggatgttggtcactaacgatcagggacgcagttacgatcgtttccgcgagcgggtgatgttccccattcgcgataaacgcggtcgggtgattggttttggcgggcgcgtgctgggcaacgatacccccaaatacctgaacagcccggaaacagacattttccataaaggccgccagctttacggtctttatgaagcgcagcaggataacgctgaacccaatcgtctgcttgtggtcgaaggctatatggacgtggtggcgctggcgcaatacggcattaattacgccgttgcgagcttaggtacgagtaccaccgccgatcacatacaactgttgttccgcgcgaccaacaatgtcatttgctgttatgacggcgaccgtgcaggccgcgatgccgcctggcgagcgctggaaacggcgctgccttacatgacagacggccgtcagctacgctttatgtttttgcctgatggcgaagaccctgacacgctagtacgaaaagaaggtaaagaagcgtttgaagcgcggatggagcaggcgatgccactctccgcatttctgtttaacagtctgatgccgcaagttgatctgagtacccctgacgggcgcgcacgtttgagtacgctggcactaccattgataagccaagtgccgggcgaaacgctgcgaatatatcttcgtcaggaattaggcaacaaattaggcatacttgatgacagccagcttgaacgattaatgccaaaagcggcagagagcggcgtttctcgccctgttccgcagctaaaacgcacgaccatgcgtatacttatagggttgctggtgcaaaatccagaattagcgacgttggtcccgccgcttgagaatctggatgaaaataagctccctggacttggcttattcagagaactggtcaacacttgtctctcccagccaggtctgaccaccgggcaacttttagagcactatcgtggtacaaataatgctgccacccttgaaaaactgagcatgtgggacgatatagcagataagaatattgctgagcaaaccttcaccgacagtctcaaccatatgtttgatagcctgcttgaactgcgccaggaagagttaatcgctcgtgagcgcacgcatggtttaagcaacgaagaacgcctggagctctggacattaaaccaggagctggcgaaaaagtgatttaacggcttaagtgccgaagagcgatcgggaagcccccgacagccgcactgagaggcagcggcaaatatataagtacgccctcgtaattatcgttggcggtaaacaaccgttggatttcagcgttaacggctgaaggacatcgggtcaatcgcccaacaccaacctcatgaaataagtgtggataccgtcttatggagcaaaacccgcagagtcagctgaaacttcttgtcacccgtggtaaggagcaaggctatctgacctatgccgaggtcaatgaccatctgccggaagatatcgtcgatagtgatcagatcgaagacatcatccaaatgatcaacgacatgggcattcaggtgatggaagaagcaccggatgccgatgatctgatgctggctgaaaacaccgcggacgaagatgctgccgaagccgccgcgcaggtgctttccagcgtggaatctgaaatcgggcgcacgactgacccggtacgcatgtacatgcgtgaaatgggcaccgttgaactgttgacccgcgaaggcgaaattgacatcgctaagcgtattgaagacgggatcaaccaggttcaatgctccgttgctgaatatccggaagcgatcacctatctgctggaacagtacgatcgtgttgaagcagaagaagcgcgtctgtccgatctgatcaccggctttgttgacccgaacgcagaagaagatctggcacctaccgccactcacgtcggttctgagctttcccaggaagatctggacgatgacgaagatgaagacgaagaagatggcgatgacgacagcgccgatgatgacaacagcatcgacccggaactggctcgcgaaaaatttgcggaactacgcgctcagtacgttgtaacgcgtgacaccatcaaagcgaaaggtcgcagtcacgctaccgctcaggaagagatcctgaaactgtctgaagtattcaaacagttccgcctggtgccgaagcagtttgactacctggtcaacagcatgcgcgtcatgatggaccgcgttcgtacgcaagaacgtctgatcatgaagctctgcgttgagcagtgcaaaatgccgaagaaaaacttcattaccctgtttaccggcaacgaaaccagcgatacctggttcaacgcggcaattgcgatgaacaagccgtggagcgaaaaactgcacgatgtctctgaagaagtgcatcgcgccctgcaaaaactgcagcagattgaagaagaaaccggcctgaccatcgagcaggttaaagatatcaaccgtcgtatgtccatcggtgaagcgaaagcccgccgtgcgaagaaagagatggttgaagcgaacttacgtctggttatttctatcgctaagaaatacaccaaccgtggcttgcagttccttgacctgattcaggaaggcaacatcggtctgatgaaagcggttgataaattcgaataccgccgtggttacaagttctccacctacgcaacctggtggatccgtcaggcgatcacccgctctatcgcggatcaggcgcgcaccatccgtattccggtgcatatgattgagaccatcaacaagctcaaccgtatttctcgccagatgctgcaagagatgggccgtgaaccgacgccggaagaactggctgaacgtatgctgatgccggaagacaagatccgcaaagtgctgaagatcgccaaagagccaatctccatggaaacgccgatcggtgatgatgaagatagccatctgggggatttcatcgaggataccaccctcgagctgccgctggattctgcgaccaccgaaagcctgcgtgcggcaacgcacgacgtgctggctggcctgaccgcgcgtgaagcaaaagttctgcgtatgcgtttcggtatcgatatgaacaccgactacacgctggaagaagtgggtaaacagttcgacgttacccgcgaacgtatccgtcagatcgaagcgaaggcgctgcgcaaactgcgtcacccgagccgttctgaagtgctgcgtagcttcctggacgattaatcggtaggccggatcaggcgttacgccgcacccggcactaggccctctgcacaaacgccaccttttcggtggcgttttttatcgcccacgcactaccagcgcctggtccagctcgcgatacgcttcaaccagtttctccagactaacgcgacttaaaccgctgggatttggcagcacccaaatctgcgtgctaccaatggtgagcgtttgtttcccccactgtgcaccgcgctggctgaatccctgttcatatgcttgtttgcccagaatcgccaacgcctgcggctgataatcttcaattttttcaatcagcttacgcccgcctgcgtgtagctcctgcttactaacttcattggcttgcaccgttggacggtctaccagtttggtgacgccacaacgataatccagcagatgctgtgcctcctgcggcttcaactgacggtcggtaaacccggcctgatatatcaccttccagaagcgatttgccggatgagcaaagggaaaaccagtcccggcggaactaagcccagggttgataccgcaaaacacgacccgtaaccctggagccaaaatatcctcaaccatatttactcctttctaacatcaccaggaaaagtataacggattgaaaatacattgtttataaaaacagcaggcgcgcggtaatggctggattgcgacacggagttactttataatccgctaccatggccccttagctcagtggttagagcaggcgactcataatcgcttggtcgctggttcaagtccagcaggggccaccagatatagcaaaggctgacgagaaatcgtcagcctttttctttttatatatcagttactttgcgtgccagtaagccgctgcacgtacccgctgtgggtcatactgttccgcttcaaagcggcggcttaaattcttaacgactttaccttcgccggttatccagatgaagtaatcatcggcagggatttgcatctgcgccagacgcgcatctaccgcctgctcatcatgtgccagccattcgatattaaaaccatcaaggtgcgcgagataatcctgacaggcgttatcccgcacgctaaccagcgcactaacttgcggtttaacggcaagtttgctcaacgtttccaggcggcggcgcaatgcaggcattccggattcatcgcagacatacagctgatacgcgtaatcttccggcaccaccaggctaccgcgcggacctgccaccgtaagtttatcgcccggttgcgcctgcatcgcccagccgctggcgaccccaccgtcgtgaataaagaaatcaatcgccagttcatggcgtagttcgtcatacagcggcgtatagtcacggctcggtgggcgtggtccttccggccagacgatgccctcttccgttaccgttggcggcacaaagtgagcgtcaggttgaggaaagaagagtttgctgtgatcgtcaaagccacggcttgtaaaaccgtccagcgcctcgccgccgaggacaatgcgctgaaaaccggcgctgatgcgctcaacgcgtaacacagtcagttcacggaagcgcagatcattgcgaacgcgctgcgggtagcggggggtgttattcattgttatcgccttcgtgatggtaatcagatatatctaaataaaactcgcaaatgataatgattgttaatcatgataaatgcaagcgatttgtagaactgatatgtctatagtctgataagacgaaccgcctcttctcaggcatcattactcaacgccggatgcggcgtgaacgccttatccggcctacgtgtgagatgagtccacgtttaaaaatcatttttacacttgcaagaacgctcatatcagatataaattagatatatctaattaagcaaaaggaggctgatatgagccatcatcacgaagggtgttgtaaacatgaaggccagccacgccatgagggctgctgcaaaggtgagaagagtgaacacgagcactgcggacacggtcaccagcatgaacacggtcaatgctgcggtggtcgccacggtcgcggcggcggtcgtcggcaacgtttctttggtcacggtgaattacgtctggtgattctggatattctcagccgcgatgacagccacggttacgaattgattaaagcgattgagaatctaacccaggggaattacaccccaagcccgggcgtcatctacccaacgctggattttctgcaggagcagagcctgattaccatccgcgaagaggaaggaggtaagaagcagattgcgctgaccgaacaaggcgcgcagtggctggaagaaaaccgcgaacaggtggagatgattgaagaacgcatcaaagcgcgttgcgttggcgcggcgctgcgccagaacccgcaaatgaagcgggcgctggataattttaaagcggtgctggatttacgcgtcaaccagagcgatatcagtgatgcacaaataaaaaagatcattgcggtgatcgaccgcgccgcttttgatattacgcaactggattaatcgccgcatccgccagtggcgcggtgcaattgccggatgcgacgcttgacgcgccttatccggcctacacccgctacacaccccgcaggcctgataagatgcgccagcatcgcatcaggcattgtgctccaaccgccggatccggcataccgattaatgcagtaccgtcaccgcgtcttccagtcggctggcgcggtgtttcaccatcgcgctcacctgcgcactctcttccaccagctcggcatttttctgggtgatcaggttaagctcatccactgcacgggtcaggctggaaagcccatcggcctgttccagcgtactatggctaatctgggcgatcaactgggtgacgtttttcacctgtgccacaatatcttccatcgtccgtccggcggcgtgtacctgctggctaccggattgcaccttatcagcactggcatcaatcagcttgcgaatatcgttggcagcattagcgctgcggctggctaaatgacgcacttcccctgccaccactgcaaaacctttgccctgttcgccggcacgcgccgcttccaccgccgcattcagggccagaatattggtctgaaacgcaatatcgttaatcaggctagtaatggtgccaatgcgctgggtactgtcggcgatatcgtccattgtcttgatcaccgtggtcatcgcctccccaccctgcactgccgcattactggcagtgatactcagtttatcggcagcgctcgccgtggcagagttctgtttcacgctcgccgccatttggttcatggtcgccaccgtttgctgaacgttatcaactgtctgctgggtatgttcgttcagttcatcggtgcctttcgccagcgtctcactgccatttctgacactggacacctggctactgacatcgttaattagccaacggcacatcaggccaagttgccctaccgcacgtaatgtcagccccagctcatcgctgcgattcagatgctcaacactattacgttctccggtcgccaccttcagtgcctgatgggcaacattttctatcgggcgcacaatctgccattcaaaacaggcgcttgccaacaataccactaacgcacagaggatatacgtcaccaccggggcagcaacaaaccaaagcatggccgccagcaagataaacatcagggtcatcactccacgcgcccgccagcgaagcggtaaactaggcagtttacccagccagcctttacgcaccaccaggcctttatgaatacgcttactggtacgtccggcgttcaacgctttgtacagcggctccaccgccgcgatctcttcatccgtcgcccgggtacgaatgctcatatagccactgatttttccctcgcgcaccatcggtaccgcattggcccgcacccaataatggtcaccatttttgcggcgatttttcacgatgccgctccagggctccccttttttcagggtgaaccacatatccgcaaacgccgcttttggcatatccgggtgacgcaccatgttgtgcggctgcccttgtaactcttgcaaggtatagccgctcacctgcacaaaagtgtcattagcatgagtgatatagctttgcagatcggtagtggacatcagagtggtatcgtccgccagcggggtattttgctgggtgacatacggatgagaagacatgttcgcgtcctgtgcaggttatatggttgttaacttcttgtcagagtttatgtcggccccgctgcggttatctttaaccgattaatttgatttagatcgcaatttgcgatttaaacacaaatctaattccttgatttaaaatactttcactctgttactatacgaaaacgttaattatcttgcccaaaaatcaggcaattattgccctgaaaacgtgcatttgcgcagcaatcatcaaatccatacccgacaaaaaccgtgcaaaataacaacaaatgttaacagatagcattaaatattgcacaaatgataaccgaatttgtgtttatcccgattttcgcgatcgcagccggagtggcgcaatccctgcaatacttaaatcggtatcatgtgatacgcgagcctccggagcatattttgaacaggttacctagcagcgcaagcgctttagcgtgcagcgcccacgccctgaatctcattgagaagcgaacgctggatcatgaggagatgaaagcacttaaccgagaggtgattgaatacttcaaagagcatgtcaatccggggtttttagagtatcgcaaatctgttaccgccggcggggattacggagccgtagagtggcaagcgggaagtttaaatacgcttgtcgacacccagggccaggagtttatcgactgcctgggaggttttggaattttcaacgtggggcaccgtaatccagttgtggtttccgccgtacagaatcaacttgcgaaacaaccgctgcacagccaggagctgctcgatccgttacgggcgatgttggcgaaaacccttgctgcgctaacgcccggtaaactgaaatacagcttcttctgtaatagcggcaccgagtccgttgaagcagcgctgaagctggcgaaagcttaccagagtccgcgcggcaagtttacttttattgccaccagcggcgcgttccacggtaaaagtcttggcgcgctgagcgccacggcgaaaagcaccttccgcaaaccgtttatgccgttactgccgggcttccgtcatgtgccgtttggcaatatcgaagccatgcgcacggctcttaacgagtgcaaaaaaaccggtgatgatgtggctgcggtgatcctcgaaccgattcagggtgaaggtggcgtaattctgccgccgccgggctatctcaccgccgtacgtaagctatgcgatgagttcggcgcactgatgatcctcgatgaagtacaaacgggcatggggcgcacgggcaagatgttcgcctgcgagcatgagaacgtacagccggatatcctctgccttgccaaagcgctcggcggcggcgtgatgccgattggcgcgaccatcgccactgaagaggtgtttagtgttctgttcgacaacccattcctgcataccaccacctttggcggcaacccgctggcctgtgcggcggcgctggcgaccatcaatgtgttgctggagcagaacttaccggctcaggctgagcaaaaaggcgatatgttgctggacggtttccgtcaactggcgcgggaatatcccgatctggtacaggaagcgcgtggtaaagggatgttgatggcgattgagtttgttgataacgaaatcggctataactttgccagcgagatgttccgccagcgcgtactggtggccggaacgctcaataacgccaaaacgatccgcattgaaccgccactgacactgaccattgaacagtgtgaactggtgatcaaagcggcgcgtaaggcgctggcggccatgcgagtaagtgtcgaagaagcgtaatatcaaatcggatggcgatacgacgtcgccatccgatctttttatacgacgcgtacgcccgcaggcatcatccgctccggcgttaacagcacgctttcactgccgtcatcggtttccgcacacaacagcatgcattcgctcgtttcaccacgcattttcgctttttgcagattgcataagaccaccaccgttttccccatcagctcttcttcgctgtagtacggcaccaggctggtcacggtttgcagcgttttttgccccacatcaacctgtacgatgtacagcttgtcggcgttttcatggcgtttcacttccacaatctttccgacgcgcatttccagacgtgcaaaatcagcgtaagccacggtttccattgcttcctcccttagggtaaaattttactaaactatagcaaaagtttttctcaatcctgtaggctaaaaatggagaatgcaggcgtgatcacattcgtgagccgctgtgttaccgttacagcgtcaaagaaacgcgctttatttactgaaaacaggtgacccgataagcacttcctctacaatgggggcgcacatcagggaaagtaaaaaaggtaaacatggcaacactaaaagacatcgcaatcgaagctggcgtatccctggcgacagtatccagggtcttaaatgacgatccgacattgaatgtgaaagaagagacgaaacatcgcattctcgagatcgccgaaaagctggagtacaagaccagtagtgcccgtaaactccagacaggtgcagtcaaccaacaccatattctggctatctacagctaccagcaggagctggagatcaacgatccttactatctggcgatccgccacggcattgaaacccagtgcgaaaagctgggcatcgagctcaccaactgttatgaacacagcggcttaccagacattaaaaacgtcaccggtattttaattgtcggcaaacccacgcccgccctgcgcgccgctgccagcgcgttgaccgacaatatctgttttatcgactttcacgaacccggcagcggttacgatgcggtggatatcgatctggcacgcatcagtaaagaaatcatcgacttctatatcaaccagggcgttaatcgtattggttttattggcggtgaagatgagcctggcaaggcggatattcgtgaggtcgcctttgcggaatatggccgactgaaacaagtggtacgcgaagaggatatctggcgcggcggtttttccagtagcagcggttatgaactggcaaaacaaatgctggcgcgggaagactatccgaaggcactgtttgttgcttccgattccattgctatcggcgtactgcgggcaattcatgaacgaggcctgaacatcccacaggatattagccttatcagcgttaacgatatccccaccgcgcgatttacctttccgccgctctccaccgtgcgcatccattccgagatgatgggaagtcagggcgttaacctggtgtatgaaaaagcccgcgatggtcgcgcgctgccgctgttagtcttcgttcccagcaaattaaaactgcgcggcacgacccgttaaatccccttacacactgtccggcaatcgtttttgccggacagtgctgccgtttattttcgtgatccagttaaagtaaatgcatttacctgctactttttagtaaaaattttactaaactccccagcaattacacaaactaccatcaccatgaatggttccgatttctctctaccgggaggccctatgaatcgctgggaaaacattcagctcacccacgaaaaccgacttgcgccgcgtgcgtacttttttagttatgattctgttgcgcaagcgcgtacctttgcccgcgaaaccagcagcctgtttctgcccttaagcggtcagtggaatttccacttttttgaccatccgctgcaagtaccagaagccttcacctctgagttaatggctgactgggggcatattaccgtccccgccatgtggcaaatggaaggtcacggcaaactgcaatataccgacgaaggttttccgttccccatcgatgtgccgtttgtccccagcgataacccaaccggtgcctatcaacgtattttcaccctcagcgacggctggcagggtaaacagacgctgattaaatttgacggcgtcgaaacctattttgaagtctatgttaacggtcagtatgtgggtttcagcaagggcagtcgcctgaccgcagagtttgacatcagcgcgatggttaaaaccggcgacaacctgttgtgtgtgcgcgtgatgcagtgggcggactctacctacgtggaagaccaggatatgtggtggagtgcggggatcttccgcgatgtttatctggtcggaaaacacctaacgcatattaacgatttcactgtgcgtaccgactttgacgaagcctattgcgatgccacgctttcctgcgaagtggtgctggaaaatctcgccgcctcccctgtcgtcacgacgctggaatataccctgtttgatggcgaacgcgtggtgcacagcagcgccattgatcatttggcaattgaaaaactgaccagcgccagctttgcttttactgtcgaacagccgcagcaatggagtgcagaatccccttatctttaccatctggtcatgacgctgaaagacgccaacggcaacgttctggaagtggtgccacaacgcgttggcttccgtgatatcaaagtgcgcgacggtctgttctggatcaataaccgttatgtgatgctgcacggcgtcaaccgtcacgacaacgatcatcgcaaaggccgcgccgttggaatggatcgcgtcgagaaagatctccagttgatgaagcagcacaatatcaactccgtgcgtaccgctcactacccgaacgatccgcgtttttacgaactgtgtgatatctacggcctgtttgtgatggcggaaaccgacgtcgaaagccacggctttgctaatgtcggcgatattagccgtattaccgacgatccgcagtgggaaaaagtctacgtcgagcgcattgttcgccatatccacgcgcagaaaaaccatccgagcatcatcatctggagcctgggcaatgaatccggctatggctgtaacatccgcgcgatgtaccatgcggcgaaagcgctggatgacacgcgactggtgcattacgaagaagatcgcgatgctgaagtggtcgatattatttccaccatgtacacccgcgtgccgctgatgaatgagtttggtgaatacccgcatccgaagccgcgcatcatctgtgaatatgctcatgcgatggggaacggaccgggcgggctgacggagtaccagaacgtcttctataagcacgattgcattcagggtcattatgtctgggagtggtgcgaccacgggatccaggcacaggacgaccacggcaatgtctggtataaattcggcggcgactacggcgactatcccaacaactataacttctgtcttgatggtttgatctattccgatcagacgccgggaccgggcctgaaagagtacaaacaggttatcgcgccggtaaaaatccacgcgcgggatctgactcgcggcgagttgaaagtcgaaaataaactgtggtttaccacgcttgatgactacaccctgcacgcagaggtgcgcgccgaaggtgaaacgctcgcgacgcagcagattaaactgcgcgacgttgcgccgaacagcgaagcccccttgcagatcacgctgccgcagctggacgcccgcgaagcgttcctcaacattacggtgaccaaagattcccgcacccgctacagcgaagccggacaccctatcgccacttatcagttcccgctgaaggaaaacaccgcgcagccagtgcctttcgcaccaaataatgcgcgtccgctgacgctggaagacgatcgtttgagctgcaccgttcgcggctacaacttcgcgatcaccttcagtaaaatgagtggcaaaccgacatcctggcaggtgaatggcgaaagcctgctgactcgcgagccaaagatcaacttcttcaagccgatgatcgacaaccacaagcaggagtacgaagggctgtggcaaccgaatcatttgcagatcatgcaggaacatctgcgcgactttgccgtagaacagagcgatggtgaagtgctgatcatcagccgcacagttattgccccgccggtgtttgacttcgggatgcgctgcacctacatctggcgcatcgctgccgatggccaggttaacgtggcgctttccggcgagcgttacggcgactatccgcacatcattccgtgcatcggtttcaccatgggaattaacggcgaatacgatcaggtggcgtattacggtcgtggaccgggcgaaaactacgccgacagccagcaggctaacatcatcgatatctggcgcagcaccgtcgatgccatgttcgagaactatcccttcccgcagaacaacggtaaccgtcagcatgtccgctggacggcactgactaaccgccacggtaacggtctgctggtggttccgcagcgcccaattaacttcagcgcctggcactatacccaggaaaacatccacgctgcccagcactgtaacgagctgcagcgcagtgatgacatcaccctgaacctcgatcaccagctgcttggcctcggctccaactcctggggcagcgaggtgctggactcctggcgcgtctggttccgtgacttcagctacggctttacgttgctgccggtttctggcggagaagctaccgcgcaaagcctggcgagctatgagttcggcgcagggttcttttccacgaatttgcacagcgagaataagcaatgaggatcatcgataacttagaacagttccgccagatttacgcctctggcaagaagtggcaacgctgcgttgaagcgattgaaaatatcgacaacattcagcctggcgtcgcccactccatcggtgacagtttgacttaccgcgtggagacagactccgcgaccgatgcgctatttaccgggcatcgacgctattttgaagtgcattactacctgcaagggcagcaaaaaattgaatatgcgccgaaagagacattacaggtagtggaatattatcgtgatgaaactgaccgtgaatatttaaaaggctgcggagaaaccgttgaggtccacgaagggcaaatcgttatttgcgatatccatgaagcgtatcggtttatctgcaataacgcggtcaaaaaagtggttctcaaagtcaccatcgaagatggttatttccataacaaataacaactacggcggcaaaaggagtttgccgccaccgctaccctactcattttcggagatgtgttatgtctgataccaaacgtaatacaatcggcaaattcggcttgctcagcctgacttttgccgccgtttacagctttaacaacgttatcaataataatattgagcttggactggccagcgcaccgatgtttttcctcgcgacgattttttattttattcccttctgtctgatcatcgcagaatttgttagcttaaataaaaacagtgaagccggtgtctacgcgtgggtaaaaagtagcctgggcggacgttgggcatttattactgcctatacctactggttcgtaaacctgttctttttcaccagtctgttgccgcgcgttattgcttatgctagctatgccttcctcggatacgaatatattatgacgccggttgccaccaccattatcagtatggtgctgttcgccttctccacctgggtttccaccaacggggcgaaaatgttggggccaattacctccgtcactagtacgctgatgctgctgttaacgctctcctacattttactggcaggtacggcgctggttggcggcgtacagcctgctgacgccatcaccgttgacgcgatgatcccgaacttcaactgggcgttcctcggcgttaccacctggatctttatggccgcaggtggcgcggagtccgtcgctgtgtacgttaacgacgtcaaaggcggtagcaaaagcttcgttaaagtgatcatcctcgccgggatttttatcggcgtactgtattccgtctccagcgtgctgattaacgtcttcgtcagcagcaaagagttgaaatttaccggcggaagcgtgcaggtattccacggcatggcggcgtattttggtctaccggaagcgttgatgaatcgctttgtcggtctggtgtcctttaccgcgatgttcggttccctgctgatgtggaccgcaacgccggtgaaaattttcttctccgaaatcccggaaggcatctttggtaagaaaaccgtcgaactgaacgaaaacggcgttccggcgcgcgcagcgtggatccagttcctgatcgtcatcccgctgatgattatcccgatgctcggttccaataccgtgcaggatctgatgaatactattattaatatgaccgccgcagcgtccatgcttccgccgttattcatcatgctggcttacctgaatttacgcgccaaattagatcacctgccacgcgatttccgtatgggctcccgccgcaccggtattatcgttgttagtatgctgattgcgatatttgccgtagggtttgtcgctagcacattcccgactggcgcgaatattctgaccatcattttttataacgtcggcggtattgttatcttccttggctttgcgtggtggaaatacagtaaatatataaagggattaacggctgaagagcgccatattgaagcgacgccagccagcaatgttgattaagcagaataataaaaaatgagcaggcattttccctcttcctggatgaggagagggaaaatagtttctgcctttatatttttataattacaacgataaaaggctgtactttttctttagctcatggattaacacaatgaaattaatcactgcaccatgcagagcattacttgctctgccgttttgctacgccttttctgcggcaggagaagaagcacgtccggcagaacatgacgacacaaaaacacccgcaattaccagcacatcttctcctagttttcgtttttacggcgaattaggggttggtggatatatggatttagagggtgagaataaacataaatacagcgacggtacctatattgaaggtggcctggagatgaagtacggctcctggttcggcctgatttacggcgaaggctggaccgtgcaggccgaccacgacggcaatgcctgggtgccagaccatagctggggtggtttcgagggcggaattaaccgtttctatggcggttatcgtaccaatgatggcaccgaaatcatgctcagtctgcgtcaggattccagcctggatgacctgcaatggtggggcgatttcacccccgatctgggctacgtcattcccaatacccgcgacattatgactgcgctgaaggtacagaacttaagcggcaactttcgttatagcgtcaccgcgactcctgccggacatcatgatgaaagcaaagcctggctacattttggcaaatacgatcgctatgacgacaaatacacctatccggcaatgatgaacggttacatccagtatgaccttgccgaaggcatcacctggatgaacggtctggaaatcaccgacggcacaggacagctctatctcacgggcctgctaactcctaactttgccgctcgcgcctggcaccataccggacgcgccgacgggctggacgtaccgggaagtgaaagtgggatgatggtgagcgccatgtatgaagcgttaaagggcgtttatctctccaccgcttacacctacgccaaacatcgccctgaccacgctgacgatgaaaccacctctttcatgcagtttggtatctggtacgaatacggcggcggacgtttcgccacggcttttgatagccgcttctacatgaaaaatgcctctcacgatcccagcgaccaaatcttcctgatgcaatatttctactggtaataaggactgtaatttcatgaaaataaaaactattttaacgccagtaacctgcgctctgctgataagtttttccgcccatgccgctaacgccgacaattataaaaacgtgattaaccgtactggcgcgccgcagtacatgaaggattacgattacgacgatcaccagcgttttaatccgtttttcgatctcggagcctggcatggtcatctgttgccagacggccctaacaccatgggcggctttccgggcgttgcgctgctgacggaagagtacatcaactttatggccagcaatttcgaccgcctgaccgtctggcaggacggcaagaaagtcgactttacgctggaggcatacagtattcccggtgcgctggtgcaaaaactgacagcaaaagatgtgcaagtcgaaatgactctgcgcttcgccacgccgcgcacgagtctactggaaaccaaaatcaccagcaataaaccgctggatctggtgtgggacggcgaactgctggaaaaactggaagcgaaagaagggaaaccgctttccgataaaaccattgctggcgaataccctgactatcagcgcaaaatcagcgccacccgtgatggcctgaaagtcacctttggcaaagtgcgcgccacctgggatctgctgacctccggcgaaagcgaatatcaggtgcataaatccctgccggtgcagactgaaatcaacggtaatcgctttaccagtaaggcgcatatcaacggtagcaccacgctctacaccacctattcccatctgctgaccgctcaggaagttagcaaagagcaaatgcagatccgcgatattctggcgcgtccggcgttttatctcaccgccagccagcaacgctgggaagaatacctgaagaaagggttaaccaatccggatgcgacgccggaacagacgcgcgtcgcggtgaaagcgatcgaaacgctcaacggtaactggcgcagtccgggcggtgcggtgaaatttaacaccgttacaccgagcgtgaccgggcgctggttctccggcaatcagacctggccgtgggatacctggaagcaggcgtttgcgatggcgcatttcaatccggacatcgccaaagagaatatccgcgcggtcttctcctggcagatccagcctggcgatagcgtgcgtccgcaggatgtgggctttgtccccgacctgatagcgtggaaccttagccccgagcgtggtggcgatggcggcaactggaacgaacgtaataccaaacccagccttgccgcctggagcgtgatggaagtgtataacgtcacccaagataaaacctgggtggcagagatgtacccgaaactggtggcctatcacgactggtggttacgtaaccgcgatcacaacggcaacggcgtgccggaatatggcgcgacccgcgacaaagcccacaacactgagagcggcgagatgctgtttacggtgaaaaaaggcgataaagaagagacgcagtctgggctgaacaactacgcccgcgtggtggagaaaggccagtacgacagtctggaaattccggcacaggttgctgcaagctgggaaagcgggcgtgatgatgccgccgtctttgggtttatcgacaaagaacagttggataaatatgtcgctaatggcggcaaacgtagcgactggacggtgaaattcgccgaaaaccgcagtcaggacggaacgttgctgggctacagcctattgcaggagagcgtggatcaggccagctatatgtacagcgataaccattatctggcggagatggcaaccatcctcggtaagccagaagaggccaaacgctatcgccagttggcacagcagctcgcggactacatcaacacctgtatgttcgacccgactacccagttctactatgacgtacgtattgaagataaaccactggcgaacggctgcgcgggcaaaccgattgttgagcgcggtaaagggccggaaggctggagcccgctgtttaacggtgcggcaacgcaggccaatgccgacgcggtggtgaaggtgatgctcgatcctaaagagttcaacacctttgtcccgctgggaacggcggcgttaaccaatccggcttttggcgctgatatctactggcgtgggcgcgtatgggtggatcagttctggtttggtctgaaagggatggagcgttacggttatcgtgatgatgccctgaagctggcggatacgttcttccggcacgccaaagggttaaccgccgatggaccaattcaggaaaattacaacccgctgacaggcgcacagcaaggcgcaccaaatttctcctggagtgccgcgcatttgtatatgttgtataacgattttttccgtaagcaataatttgcaactgctggcggatgcggcgtaaacgccttatccgccctacatgtgcaatcctcctggccggataaaacgcggcaagcgttgcatccggcaactgcaccgcgccactggcggatgcggcgtgaacgccttatccgccctacatgtgtgttcccgtaggtcggataagacgcgacaagcgtcgcatccggcatctgcaccgcgccactggcggatgcggcgtggacgccttatccgccctacatgtgcaattccgtaacctggataaaacgcgacaagcgtcgcatccggcgttatcaccgggcgtattctttttgaatcccatcacaaaccccgcactccccttttcccttttctccggcgacggctaaattagaactcatccgaccacataacaattattttacatactggacaattttatgagctacccgagcctgttcgccccgctggatttaggttttaccacgttaaaaaaccgcgtgttgatgggcagtatgcacaccgggctggaggaatacccggacggtgccgagcggctggcagcgttttatgccgaacgcgcccgtcacggcgtggcgctgattgtcagcggcggcattgcaccagatttaacaggcgttggcatggaaggtggcgcaatgctcaacgacgccagccagatcccacaccatcgcaccattaccgaagcggtacatcaggaaggcggcaaaatagccctgcaaattttgcataccgggcgctacagctaccaaccgcatctggtcgccccgtccgcattgcaggcccccatcaaccgtttcgtgccccatgagttaagccatgaagagatcctgcaactgatcgacaatttcgcccgctgcgcgcaactggcgcgggaggcaggatacgacggtgtagaggtgatgggttccgaagggtatttgatcaacgaatttctgacgctgcgcaccaatcagcgtagtgaccagtggggcggcgattaccgcaaccggatgcgatttgccgtagaagtagtgcgtgcggtgcgcgaacgcgtcggcaacgacttcattattatctaccgactgagcatgctcgacctggtcgaagacggcgggacttttgccgaaacggtagagctggcgcaggccattgaagcggcgggcgcgaccattatcaacaccggcattggctggcatgaagcacgtattccgaccattgccacgcccgtgccgcgcggcgcatttagctgggtcacgcgcaaactgaaaggccacgtcagcctgccgctggtaaccaccaaccggattaacgatccgcaggttgccgacgatattctcagccgcggcgatgccgatatggtaagcatggcgcgaccgtttcttgctgatgcggagctgctgagtaaagcgcaaagcggacgagccgatgagatcaacacttgtattggctgcaatcaggcctgtctcgatcaaatcttcgttggcaaagtcaccagctgcctggtgaatcctcgcgcctgccacgaaaccaaaatgccaatccttcccgccgtgcagaaaaaaaatctggcggtggtcggtgcgggacctgctgggctggcgtttgccattaacgcggcggcgcgtgggcatcaggtaacattgtttgacgctcatagcgagattggcgggcagtttaatatcgccaaacagatccccggcaaagaggagttttacgaaacgctgcgctattaccgccggatgatcgaagtgacgggcgtgacgctaaaactcaatcacaccgtgacggcggatcagttacaggctttcgatgaaacgatcctcgccagtgggatcgtgccgcgcactccgcccatcgacgggatcgatcatccgaaggtattgagttatctcgatgtactgcgcgacaaagcgccggttggcaacaaagttgccatcatcggttgtggcgggattggttttgatacggcgatgtatttaagtcagccgggcgaatccaccagccagaatatcgccgggttctgtaatgaatgggggatcgacagtagcctacaacaggctggtggcttaagcccgcagggaatgcagatcccccgtagcccacggcagattgtgatgctccagcgcaaagccagcaaaccaggacaggggttaggcaaaaccaccggctggatccatcgcaccaccctgctcagccggggtgtgaaaatgatcccaggcgtaagttatcagaagattgacgatgacgggctgcatgtggtgatcaacggcgaaacgcaggtattagcagtggacaatgtggtgatctgcgcagggcaagagccaaaccgcgcgctggcgcaaccgctgattgatagcgggaaaacggtgcatttaattggcggctgcgatgtggctatggagctggacgcacgacgggcaattgcccagggaacacggctggcgctggagatttaaatcgttatttgaagcgccggatgcaacgcatccggcacgtcgcgttaatcaataaacaaggcgggagaaatgccgaatcgcgttgccaattttttagcgtgttccagcgttaatttcctcttcccgctcaaaacgcgactcaccatagatttactgccaatttccggcagatcggaaagggttaaaccatattgatccataagggtacgaatcacggctataccgccaggcatggcttgagccatggcattaaattccgcaaattcgggcgcactttcttcccacgcggttattttggcacacaccagatccagcaaggggttttcaggatcgttgagcagcagatgatctaccagttccagcgcctgggtgtattgttcctcgttctgaatacccgccagaaaaggtgccacagcagttagcttttctcctgcttgcaagatgtcggcaatcgcaatcattttttccccttagtacgatgaacagcggtaaagaaatcgtattctttatgcgtcataacttcacgtatgtagcacttttggctttcaaaaaagaccattgctacaacacgtaattcattgcccccaacattgaaaacataatgcttatccagatatttgaagttatccagagatgggaatactgcttttaaactctcaggttttttgaaatatcccttagcaatcgtgttccccagagccaccaactccgttttatgttgcgggtatttttccgcagcatctttcaatgctttttgagttatcaggtgcattcttcatcacgtccgttgacaaattggcaatatgataacatccgttgccagattggcaacggatgaatttatctgtgtgacggaagaataaacgtagaaaaacgctaaacaagagaatgtagacgatggtgacagggattttttgttttatggaagcgcgattccagaactgggcagacattgccggatgcgacgcttgccgcgtcttatccggcctggagtaacgtgctgaacgtaggccggataaggcgtttacgccgcatccggcaggtaactcccaatcttaccgacgacgtcccagcttcaccgctttcagtaccacaaatttattattcgtcgcaatagtggtgcagttgccgaaaatcttcttcagtttatggaagtaatccaggtgacggttggcaacgatatacagctcgccgttgattttcaggcagcggcgggcgtggtggaacatctcccaggcgacgttatcggtcagcgcatgttgttggtgaaacggcgggttgcagagcacagcattaaagcggaaaggctccacgccggagagcgcgttgttgatcataaactcgcagcgatccaacgcctctggcatgttggtttcaacgttcaaacggctggaagcaaccgccatcgggctttcatcgacaaacaccactttcgcctgcgggtttttatcaagcagcgtcagaccaataacgccattaccgcaaccgagatcgacaatctccccttcgagattctctggcagatgttgcataaagaagcgcgcgccgatatcaagcccggtgcgggagaagacattcgcatggttgtggatagtccagtcagtaccttccagcttccagctaacggtctgcggcgcatcggccagctgcggttcattgaaagtgcaattaatcaggcgcgcttttttccatgccagcgtggtggtggttgggccgagcactttttcgaacagttccagcgtggaagtgtgaatgtcacgggccttggcaccggcaataatacgtgtatcgctcgtgaccactttgcgcagcgcacgcagttgctgttccagcaatgccagtgttttcggcactttgatcagcaccacacccggctgttgcgggtagtcggcggtgctgtcgagaaacttcacgctgctctcatcaatcccgttgaggcgtaaattctcgcgcgtcgccagttcactgatgtaactgtcgccaatgctgtacggcttatgttccgccagtgcgcagcttaacgcaccaaaggcatcattcaggatcaacaccgggccgcggatttctgtgtcgtccaactgttgcagcaaatattcatccgccgcttcccacgcctgtagcgggttaacgtcatccgtcgccggaaaacgttgtagtgtcagactacggaaaccgttgtctaagtggctcatcggccctcctgaatgataaaatttcgacattgcccctgaaaagggtgcgtgagtataccctttttctctttttcgtgggcggttatgagcaatcttacttatcttcagggttatcccgagcagctactttcccaggtgcgaacactgattaacgaacagcgtctgggcgatgtgctggcaaaacgctatccgggaacacacgactacgccaccgataaagccctctggcaatatactcaggatctgaaaaatcagtttctgcgtaatgccccgccgatcaataaagtgatgtatgacaataagatccatgtgctaaaaaacgcgctcgggttacataccgctgtttctcgtgtgcagggcggcaagctgaaagcaaaggtggagatccgcgtcgctaccgtgtttcgcaacgcgccggaaccgtttttgcgcatgatcgtggtgcacgagctggcgcacctgaaggagaaagagcataacaaagcgttttaccagttgtgttgtcatatggaaccccagtaccaccagcttgagttcgacacccgactgtggctaacgcagttgagccttgggcagaacaaaatctgaaaatgatgtcaggcgttatcttttctttctttagcgcctaaaatcgacctcccccctttcgttaaggataacgaccatgctgcgcgcatttgcccgccttcttctccgtatttgtttttctcgccggactctaaagattgcctgcttactgttacttgtggcaggagcgaccatccttatcgccgatcgcgtaatggtcaacgccagcaaacagctgacctggagcgatgtcaacgccgttccggcgcgtaacgtgggtttattgctgggggcgaggccgggtaatcgctactttacccgacgtattgataccgcagcagcgttgtaccacgccggaaaagtgaaatggctgctggtaagtggcgataacggacgtaaaaattacgatgaagcaagtggtatgcagcaggctttgatcgctaaaggcgtaccagcaaaagtgatcttctgcgactatgccggattcagtacgctggatagcgtagtgcgtgccaaaaaggtttttggtgaaaaccatatcaccattatcagccaagaatttcataatcaacgcgccatctggctggcaaaacagtacggcatcgacgctatcggttttaacgcgccagacctcaatatgaagcacggtttttatactcaactgcgggagaaactcgctcgtgtcagcgccgtgattgacgccaaaatcctccatcgccagccgaaatatctcgggcctagcgtcatgattgggccgtttagtgagcatggctgtccggcgcagaaataatgcgtatctgcgcacgtcgaagatgaaaaaggcgtgctacattgacgacagaatccctttatggagtatccacgcgttatgatacgtttcgctgtgattggtacgaactggatcactcgccagttcgtcgaggccgcccatgagagcggtaaatacaagttaaccgccgtatattcccgcagccttgaacaggcccagcacttcgccaatgatttttctgtcgagcatctgtttaccagcctggaagcgatggcggaaagcgatgccattgacgcggtgtatattgccagcccgaattccctgcatttttcccagacacaacttttccttagccataaaattaatgtgatttgcgagaaaccgctggcgagcaatctggcggaagtggatgccgccattgcctgtgcgcgggaaaatcaggtggtgctgtttgaggcatttaaaaccgcctgcctgccgaactttcatttgttgcgccaggcgctgccgaaagtcggcaaactgcggaaagtctttttcaactattgccagtattccagccggtatcaacgttacctggatggtgagaatcccaacacctttaatccggcattctctaacggtagtattatggatatcggtttttactgtctggcgagcgcggtggcgttatttggtgagccgaaaagcgtgcaggcaaccgccagtttgctggcaagcggcgttgacgcccagggcgtggtggtgatggattacggtgatttcagcgtcaccttgcagcacagtaaagtcagtgattctgtcctggcgagcgagattcagggcgaagcaggaagcctggtgattgaaaaactgtctgaatgccagaaagtgtgcttcgtgccgcgtggcagccaaatgcaggatctcacccagccgcagcatattaataccatgctctacgaagcagagctgttcgctaccctggtggatgagcatctggtggatcatccagggctggcggtcagtcgcatcaccgccaaactgctgaccgagatccgccgccagactggggtgatttttccggcagatagcgtaaaactataattgccaaagtaaaacagtgtaaaaggtatgtaacagaccattgactggctgaatggtctgtcatactttgttacctgcaaaggggagtaacttcattgccggtcgatcgtcattacgatgtgtgaaaaaacacatccggtcaccgggcaacccgaaaggaatacgcagacgtattccttttttgttgtaagtgagaccttgccggaaggcgaggtctatgcataaaaagcagcggctgacgtcttccgacgttggccgtttttttatgtgtaaggaacttctatgaatactgtcggcacgccgttgctatggggcggattcgctgttgttgtcgccattatgctggctatcgacctgttgttgcaggggcgtcgtggggcacatgccatgaccatgaaacaggctgcggcctggagcctggtctgggtgacgctgagcttactgtttaacgccgctttctggtggtatctggtgcaaaccgaaggtcgcgccgttgccgatccacaggcactggcctttctcacaggttatctgattgagaaaagcctggcggtcgataacgtctttgtctggctgatgttgttcagctatttctctgttccggcggcattacaacgccgcgtgctggtgtatggcgtgctcggggcgattgttctgcgtaccatcatgatcttcactggcagctggctaattagccagttcgactggatcctgtatatcttcggtgccttcctgctgtttaccggcgtgaagatggcgctcgcccatgaagatgaaagtggcattggcgacaagccgctggtgcgctggctacgcggtcatttgcgcatgaccgacaccatcgacaacgagcatttctttgtgcgtaagaatggattgctgtacgccacaccgctgatgctggtactgattctggtggaattgagcgacgtgattttcgccgtggatagcattccggctatcttcgccgtgaccactgacccgttcattgtgctgaccagtaacctgtttgcgatcctcggcctgcgtgcgatgtatttcctgctggcgggcgtagcagagcgtttcagcatgctcaaatatggcctggcggtgattctggtgtttatcggtatcaagatgctgattgtcgacttctaccatattccaatcgccgtcagcctgggcgtggtgtttggcattctggtgatgacgtttattatcaacgcctgggtgaattatcggcatgataagcagcggggtggataatttttaatctgcctaagccgtgtaccctgtcattaacatgagcaccgttttctccctctcccttccagggagagggtcggggtgagggtaatttttcgcaccgatgctggcctgttcccctcaccctaaccctctccccaaacggggcgaggggactgaccgagtccttttttgatgttgtcatcagtctggaagccgcacgttggctttatttttatgtcaaagaaatgtaaccattaagtttcaaaatatgacctctctttaaaatccagcatttttcgcttcccgaagctgtaactttccttatactcgaccttgcaaacactttgttacatcctgaaagatgcgtcgacagaacgcaccagggatgtgcgacaacacaatgaaaggatcgaaaaatgactacgcaacgtagtccggggctattccggcgtctggctcatggcagcctggtaaaacaaatcctggtcggccttgttctggggattcttctggcatggatcagtaaacccgcggcggaagctgttggtctgttaggtactttgttcgtcggcgcactgaaagccgttgcccccatcctggtgttgatgctggtgatggcatctattgctaaccaccagcacgggcagaaaaccaatatccgccctattttgttcctctatctactgggcaccttctctgctgctctggccgcagtagtcttcagctttgccttcccttctaccctgcatttatccagtagcgcgggtgatattagcccgccgagtggcattgtcgaagtgatgcgcgggctggtaatgagcatggtttccaaccccatcgacgcgctgctgaaaggtaactacatcgggattctggtgtgggcgatcggcctcggcttcgcactgcgtcacggtaacgagaccaccaaaaacctggttaacgatatgagcaatgccgttacctttatggtgaaactggtcattcgcttcgcaccgattggtatttttgggctggtttcttctaccctggcaaccaccggtttctccacactgtggggctacgcgcaactgctggtcgtgctggttggctgtatgttactggtggcgctggtggttaacccattgctggtgtggtggaaaattcgtcgtaacccgttcccgctggtgctgctgtgcctgcgcgaaagcggtgtgtatgccttcttcacccgcagctctgcagcgaacattccggtgaatatggcgctgtgtgaaaagctgaatctggatcgcgatacctattccgtttctattccgctgggagccaccatcaatatggcgggcgcagcaatcactattaccgtgttgacgctggctgcggttaatacgctgggtattccggtcgatctgcccacggcgctgctgttgagcgtggtggcttctctgtgtgcctgtggcgcatccggcgtggcgggggggtctctgctgctgatcccactggcctgtaatatgttcggtattagcaacgatatcgccatgcaggtggttgccgtcggctttatcatcggcgtattgcaggactcttgcgaaaccgcgctgaactctagtactgacgtgctgttcactgcggcagcttgccaggcagaagacgatcgtctggcaaatagcgccctgcgtaattaattgtttaacccctttcgtctacggcggaaggggttttctcaactttaaacggatcaattccccttttctgcatccgccagaaacgaatgatattcaggccattcataagcagaaaactaccctcaatcatcgtgccgcctatgctccccgcccagaagttgtgaatcacccagcaacacgtactaaaccacattacgcagcgcatggtcagccctttacagcagaatagcgcccaggtactgacaatcgtgccgataaccggcaatagttcgacaggatgatggaacttcgcgaggccaattccgccagtcagcacaataaaaatcgccattacccataagctgcgcgtgcgtaaggtaatcaatgtacgaatggcattaaggatggcactggcaccagcgggataggtgcccagaagaaaaaaatgtacgccaataacggcgctatagacgctaagctgctttttgaagcgacgttcgtcacgattgaaaaatgttgtgataccaatcagaaaggcgatgacacccacgccctgggccagccaatacgcggtcatgataaatccttagcaggtatggaaaagcaaacggcgcttcacattatgaaacgccgttttttattaacaactcatttcgactttatagcgttacgccgcttttgaagatcgccagttcgcggaagtcgttacgctcgttacaggtttgcttaccgttggcaaactcaacgatggtgtcgataaattcttccagcaactgcggcatcgctttaccgtggatcaactgacccgcgtcaaagtcgatccagtgttttttcttcgccgccagttcactgttggtggcgattttcaccgtcggcacaaatccaccatacggcgtgccacgaccagtactgaacagcaccatatggcagcccgcacccgccagggcgctggtcgctacggcatcgttacccggcgcacttaacaagttcagccctggcgttttcagacgctcgccgtaacgcagcacgtcaaccacgacgctggaacccgctttctgggtacagccaagacttttgtcttccagcgtggtgataccgcccgctttgttccccgggcttgggttttcatagatcggctgatcatgggcaataaagtactgtttgaagtcgttgaccatggtgaccagtttttcaaacgttgcttcgtcgcggcaatggtccatcagcaactgctctgcgccaaacatctccggcacttcggtcagtacggtagtaccgccgttagcaatcacgtagtcagagaaacgccccagcatcgggttagcagtaataccagaaagaccgtcagaaccaccgcactccagaccaaacttcagttcgctgagtttgcctggctcgcgtttatcgttgcgcatcacgttatacagctgatgcaaatgctcgattccggcttcgatctcatcatcctgctgttggcagatcatgaaatgaacgcgttcaggatcgatatcgcccagcgtttcacggaatgcggcaacctggttgttttcacagcccagaccaatcaccagcactgcgcctgcgttcgggtggcgcaccatgttttgcagcatggtgcgggtattaatgtgatcgtcgcccagctgactgcagccgtaggtgtggctgaagaggaacacgccgtcagtaccttcggcgttgttggtctctttcagaaaacggttctggatctgccgcgcgatgccgttgacacagcccacggttggcaggatccacagctcattacgcaccccgacatcgccgttagcgcgacgatagatctgcacttcacgatctgccgcttgcgcaggcagatcctgaaaatcaggttgatagcgatactgatccagatcgctcagattcgtgcgcgtattgtgggcgtgaacgtgaacacctgccgcaatatccgccaatgcataaccaatcggcaggccatatttgatgacattggccccttttgcgatatccgttaacgcaaatttatgtccacgagcaacatcctggcgcagcgtaacagtctggttatcgacactgacttctgtgccttcagccaaatctgctaaagcgaccgcgacgttatccagcgcatggatcttgatgtattgcatatcaaccccagaccttagttcagttcaatggcgaagtagtcacgcgcattgttaaagcaaatatttttcaccatctcgcccagcaggttgatgtccgccggtgcttcgcccgcttccacccagcgaccgatcatctggcacagaatgcggcggaagtattcgtgacgggtgtaactcaggaagctacggctgtcagtcagcataccgacaaagcggctcagcagaccgagctgcgccagttgggtcatctgacgttccataccgtctttctgatcgttaaaccaccagccggaaccgaactgcattttgcccggcataccttcgccctggaagttaccgatcatggtgcccagcacttcgttatcgcgcgggttcaggcagtacagaatggttttcggcagcaggttttcttcattctgcttgctcagcaacttagacagctcttccgccatcggacggtcgttgatggagtcaaagcctacatccggccccagcagtttgaactgacgcaggttgttattacgcagcgcgccaatgtggtactgctgtacccagccgcgacgtgcatattcggcaccaaggaacaccagtaccgcagttttgaactgcgccacttcgtgctcgctcagggtttcgccagccagacggcgcgccagaatgctgtccagttccgcttcgttcgcttcagcaaacatcaccacatccagcgcgtggtcagacactttacagccgtgagcggcgaagtgatccagacgtttggtcagggcagtttgcaggtcagcaaagcggcgaatgtcggtatcggaaacttcgcccagcttcgccatgtagtcgttaaaggtcgcctgttcgatgttgaaggctttgtccggacgccagctcggcagcactttgatggtgaaagagccgtctttggcgatctctgcgtgatgctccagagaatcgatcgggtcatcggtggtgccgaccattttcacgttcatctgctgcatgatgccgcgcgcggagaagttatcctgcgccagcagttcgttacattcgttccagatttcatcggcagtactcggagaaagcaatttgccagtgataccaaacggacggcgcagttcgaggtgcgtccagtggtataacgggttgccgatagtgtgcggaacagtcgccgcccaggcgtcaaatttttcacggtcagacgcatcaccggtacacagacgctcggccacaccgttggtacgcatagcgcgccatttgtagtgatcgcctttcagccagatgtcatacaggtttttaaaacgatagtcttccgcaatctgctgcggcggcaaatggcaatggtaatcgaaaatcggctggtcttttgcgtagtcgtgatacagacggcgggcaaattcggtatctaacaggaaatcttcagtcataaacggagtcattttcgtcttcctctcaacgagtgagctagcttgcttatggtgcgatgctgacaaagttatcacaccaatttccagagtccgaagatattttcgtgagttagatcaataaacgtagttaaaaaaattactctcaaagtggtaaatctcgctgcaggccgcgccagtactggccttgctgtcgtcaggtaatgtccctacaaatattcccacatttgtgatggctctcaccttttaaagttgtatgacaagttatctttctgccgtcgcaaatcataagtcgacggaatgcaaattgccgattcattcatttgttagatgaatcgggttaaccggtacggaagccgaattagcacgaaactttcatggcaacgttcggggcgtgccggttttttttcggttacccggtcgtaactaacatcttcagcctctggcgggatgatggccgcgcttcctgcggatataacaaaacgatgaggttttacatgcgtaaaattaaagggttacgttggtatatgatcgcactggtgacgctcggcaccgtgcttggttacctgacgcgtaacactgtggcggcagctgcgccaactctgatggaagagttaaacatctccacccaacagtattcctatatcatcgcagcctattctgctgcttatacggtcatgcaaccggtagcaggttatgtactggatgtgctgggtacgaaaatcggttatgcaatgtttgctgtgctgtgggccgtgttctgtggtgcaaccgcgctggcaggtagctggggtggcctggctgttgctcgtggtgcggtcggtgccgcggaagcagcgatgatcccggcgggtctgaaagccagctccgaatggttcccggcgaaagagcgttccatcgcagtaggctactttaacgtaggttctagcattggtgcgatgattgcgccgccgctggtggtatgggcaatcgtaatgcacagctggcagatggcatttatcatctccggtgcattgagctttatctgggcgatggcatggctgattttctataaacatccgcgcgaccagaagcatctgaccgatgaagaacgcgactatattattaatggtcaggaagcccagcaccaggtgagcacggcgaagaaaatgtccgttggtcagatcctgcgtaaccgtcagttctggggtatcgcgctgccgcgtttcctggcagaaccggcctggggtacttttaacgcgtggatcccgctgttcatgtttaaagtttacggctttaacctgaaagagatcgcgatgttcgcctggatgccgatgctgtttgctgacctcggttgtatcctcggtggttacctgccgccgctgttccagcgttggtttggtgtgaacctgatcgtttcccgtaagatggtcgtaacgctgggtgcagtgctgatgattggcccgggtatgatcggcctgttcaccaacccgtatgtcgcaattatgctgctgtgtatcggtggttttgcccaccaggcactgtctggcgcgctgattacgctctcttccgatgtgtttggtcgtaacgaagtggcaacggcaaacggtttaaccgggatgtccgcatggctggcaagtacgctgtttgcgctggttgtcggtgcactggctgacaccatcggcttcagcccgctgttcgcagttctggcagtgttcgacctgttaggtgcgctggttatctggaccgtgttgcagaacaaaccggcgattgaggtggcgcaggaaacacataacgatcccgcaccgcaacattaacgtttcgtgtaagttttagtttcccttcaaagccgccttctcaggcggctttttcatcactgcgagtagagctaaactcgcaaaagtggtataacaaatatagtctgccgtatcatgcctggagcgcatatggaaatcactgaaccacgccgtttgtatcaacaacttgccgctgacctgaaagagcgcatcgaacagggcgtctatctggtgggtgataaactgcctgcagaacgctttattgccgatgaaaagaacgtcagccgtacggtagttcgtgaagccatcatcatgctggaagttgaaggctatgtcgaagtgcgtaaaggtagtggtattcatgtggtttccaaccagccgcgccatcagcaggcggctgacaataatatggaattcgccaattacggtccgtttgagttgcttcaggctcgccagctcatcgaaagtaatattgccgaattcgcggcaactcaggtaacgaaacaggacatcatgaaactgatggccattcaggaacaggcgcgcggcgaacaatgcttccgtgattccgagtgggatttgcagttccacattcaggtcgctctggcgacgcagaactccgccctggcggctatcgtggaaaaaatgtggacccagcgtagtcataacccgtactggaaaaaactgcacgaacacattgattcccgtaccgtcgataactggtgtgatgaccacgatcaaatcctcaaggcgctgattcgcaaagatcctcatgctgctaagctggcaatgtggcagcatctggaaaacaccaagatcatgttatttaacgaaaccagcgacgacttcgagttcaatgccgaccgctatctattcgccgaaaacccggtggtgcatctcgatacagccaccagcggcagtaaatgaaattcctgtccgacaggcgctgcaatgcgcctgtttgtctcgtcggtaagcgaaaagtataaagtgtcagcctgtgtaaatcctctcgccaccctcccctgcattcagcaaaatcagactccacggacatgtaattttgataacgaacaacgttgacctttgttacaattagattcaatttgaatttatgtttttgaatgctttcttatctcacgatttaacagggaatagttcaggctgtgttgatgtatcaaacccgcagaacataccaaaacagcaataacattgcggtagtgcatcttttaaaaccagcgtggcgttaaccgattcaccaggaataatgaatggaacttttgacccaattgctgcaagccctgtgggcgcaggattttgaaaccctggccaatccaagcatgattggcatgttgtattttgtcttgtttgtaattttgttccttgaaaacggcttgcttccggcggcctttttaccgggcgacagtttactggtattggtcggcgtgttgattgcgaaaggcgcgatgggctatccgcaaacgattctgctgctgaccgttgccgccagcctcggctgctgggtcagctatattcaggggcgatggctgggcaatacccgcaccgtacaaaactggctatctcatttacccgcgcattatcatcaacgcgcacaccatctttttcataaacacggtttaagcgcgctgttaattggtcgctttattgcgtttgtcagaacactgctgccgacgattgccgggttaagtgggctgaataacgcgcgctttcagtttttcaactggatgagcggtctgctgtgggtattgatcctgacaactctgggttacatgctcggcaaaacgccggtatttttaaagtacgaggaccagctgatgagttgcctgatgctgctcccggtggtgctgctggtgtttggcctggcaggttctctggtcgtgttatggaaaaagaaatatggaaatcgggggtaagggatgcaaatacctcgcatgagccttcgccagctagcctggtccggcgctgttttacttctggtcggcacgctgttgctggcctggtccgcggttcgccagcaagagtctacgctggcgattcgtgccgttcatcaaggcacaacgatgccagacggttttagtatctggcatcaccttgacgctcatggcattcctttcaaaagtatcacccccaaaaacgacactctgttaattacatttgactccagcgaccagagcgccgccgcaaaagcggtcctcgacagaacattgccccatggctacatcattgcgcagcaggacaataacagtcaggctatgcagtggctgacccggttacgggataactctcatcgcttcggataacttcctgttatccgaaacatatcactcactttggtgatttcaccgtaactgtctatgattaatgaggcggtggttaacactaccgcttcgttgtctggacaatcgttcctttgtaataggtccgaatcacaatggaaggttcaagaatgaaataccgcatcgctttagctgtttctctctttgctcttagtgccggtagttatgccactaccctgtgtcaggaaaaggagcaaaatatccttaaggagatcagctatgccgaaaaacaccaaaaccagaatcgtattgacggtctgaataaagccctgagtgaagtccgggccaactgtagtgatagccagctgcgtgccgatcatcagaagaaaatcgcaaagcagaaagatgaggtggcggaacgccagcaagatttagccgaggcgaagcaaaaaggcgatgccgataagattgccaaacgcgaacggaaactggcagaagcgcaggaagagctgaaaaagctggaagcgcgcgactactaactcacaatagtcactacttactcacctggagaaaactatgagcaaagaacacactacggaacatctgcgtgctgagttgaaatccctttccgatacgctggaagaggtgcttagcagttctggcgagaagagcaaagaagagttgagtaagattcgtagcaaagcggagcaggcactgaaacagagccgttatcgcctgggtgaaaccggtgatgccattgccaaacaaacccgtgtcgcggcggcgcgtgccgatgagtatgtgcgcgaaaatccgtggacgggcgtgggcattggcgctgcaatcggtgtagtgctcggcgttctgctgagccgtcgttaattatggcggacactcatcacgcacaagggcccggtaaaagcgttctgggcatcgggcagcgaattgtttctatcatggttgaaatggtagagacacgtctgcggctggcggtggtggagctggaagaggaaaaagcgaatctctttcaacttttactgatgctgggcctgacgatgcttttcgctgcatttggtcttatgagcctgatggtgctaattatttgggcggttgacccgcaatatcgcctgaatgcgatgattgccaccaccgtggtgttgctgctactggcactgattggcggtatctggacgctacgtaaaagccgtaagtctacgttgctgcgccatacacgccatgagttagcaaacgatcggcagctgctcgaggaggagtcccgtgagcagtaaagtcgaacgtgaacgacgtaaggcgcaactgcttagccagatccagcaacaacggctggatctttccgccagtcgtcgtgaatggctggagacaacaggcgcttacgatcgtcgctggaatatgctgctaagtctgcgctcctgggcgctggttggcagtagcgtgatggcgatctggacgattcgccatcctaatatgctggtccgctgggccagacgcggttttggcgtatggagcgcctggcgtctggttaaaacgaccctcaagcagcaacagcttcgcggttaacttccctctggccggagccattccggccttatccctcaaattttttgaagatttttgacagttttccttgctaacaatcatcattcaccacgtttatgattctctccatcgacagcaacgacgctaataccgcgccattgcacaaaaaaacaatcagcagcctgagtggcgcagtggagagtatgatgaaaaaattagaagatgttggtgtactggtagcgcgcattttaatgccgattctgtttattaccgctggctggggaaaaattactggctacgcgggtacccaacaatatatggaagcaatgggcgtcccgggttttatgctgccactggtgattctgcttgagtttggtggtggtctggcaatcctgttcggtttcctgactcgcaccacagccctgtttactgcgggctttacgctgctgacggcatttttatttcacagcaactttgctgaaggcgtcaacagcctgatgttcatgaaaaacctgacaatttctggcggattcctgctgctggcaattaccggtccgggcgcgtatagcatcgaccgcctgctgaataaaaagtggtaagcacgcgctatacttaacgataaaaaacgaggaggaagctcctcgtttttgctattggaggagagaaaaatgggtcaactgattgacggcgtctggcatgacacctggtacgataccaaatctaccggcggtaaatttcaacgtagtgcttccgcatttcgtaactggctcactgccgatggcgctcctggccccactggcacaggcggttttatcgcagagaaagatcgttatcatctctatgttagtctcgcctgcccgtgggcgcaccgcacgctgatcatgcgcaaactcaaaggactggaaccgtttatttccgtttccgtagtgaacccgctgatgctggaaaacggttggacctttgatgacagttttccgggagcaaccggagacacgctctatcaaaatgaatttctgtatcagctttatctccacgccgatccacactacagcggacgagttactgttcccgtgctgtgggacaaaaagaaccacaccatcgtcagcaacgaaagtgcagaaatcatccgcatgttcaataccgcgtttgatgcgctgggcgcgaaagcgggtgattactaccctccagccctgcaaacaaaaattgacgaacttaacggctggatttatgacaccgttaacaacggcgtgtataaagctggttttgccaccagccaggaagcttacgacgaggcggtggcgaaagtgtttgaaagcctggcacgactggagcagattttaggccagcatcgttacctgaccggcaaccagctaaccgaagccgatattcgcctgtggactacgctggtgcgttttgatccggtgtatgtgacccacttcaagtgtgataagcaccgcatcagcgattacctgaatctgtacggttttctgcgcgatatctaccagatgccggggatcgccgaaacagtcaatttcgatcatatccgtaatcattacttccgcagccataagaccatcaaccctacggggattattagtattggtccgtggcaggatctcgatgaaccgcatggacgagatgttcgcttcggttaaaaaaaggcaccttacgaggtgcctctgataattagctaagtgcatgttgttcatgtcggatgtggcatgaacgccttatctgacatacaaaacattgtacattcaatagattgcataacccgcgcagaccagataagcgtagcgcatctggcgattttgcgcttgtcatcagtcttagcgcgccttcacggcactttattaattccttgaacgaatatttactgccatttcattcacgtctattcttaatttgctgctttaaaaacaagtgattgagcaaaattgaggcaaaaatggactggtatctgaaagtactaaaaaattatgtcggtttccggggtcgtgcgcggcgcaaagagtactggatgtttattctggtcaacatcatctttacgttcgtgctggggctgctggataaaatgttaggctggcaacgcgctggtggcgaaggcatcctgacgacaatctacggtattctggtgtttttaccgtggtgggcggttcagttccgccgcctgcacgacaccgaccgcagcgcgtggtgggcactgctattcttaatcccgtttatcggctggcttattatcatcgtctttaactgccaggcgggtacgccaggcgaaaaccgctttggaccagatccaaaactggaaccttaaaacaaatctgctcgccggatgtctgactcatccggcttttatcattatgttgatgaatgaataatttactaatgtttatttaaaatatttcaatgtcgttatataaattacctataaaaaataaccatgtatttatcttaaatatcaaaacctttataacatccgaaaaagaaagatacgaatagcatttacacaatacccggaatagactttcgtcacttttaattaaagggatgtttttatgcagtggtatttgtccgtattaaaaaattatgttggtttctctggtcgcgcacgtcgtaaagagtactggatgtttactctgattaacgccatcgtcggcgctattatcaatgtcattcaattgattttaggtctggagcttccatatctgtctatgctttatttgctggcaaccttccttcccgtccttgcgcttgctatccgtcgcttacacgataccgaccgtagtggtgcctgggccttgctcttttttgttccgtttattggctggctcgtgcttctggtttttttctgcacagaaggtacttctggcagcaatcgttacggaaacgatccgaagtttggtagtaattaatcttagaattggggcgatatttcgcccctttttattaacaataataaatattattttccgttaaaaagtttgggaatttcccgcagacaccaggatttcgcttcccccatactgtcacgacgccaggccataataatatcgatctcgctggtgctttccgggctgacgacacgcaaccgcccttccgcaatatctttttcgaccataggatacggcatcgtcgccacgccaagccccgccagtaatgcctgacgtttatcttcaatcgtgctcaccgttaagcgcggctgtttgtccagcagctgtacggtcaacaccgggcgctcacgagcggtatccgccaccgcaattccacgatatttcacacgcgtcacttcagataacggttccggctcctgatgaatcgggtgatcaggcgcggcaacgtagacgttcattaacgtatagagcttgcggctgttgatctcgctgctggaacgaaaatgcatatccggcgcgataacaatatccgcccgcccctgctccagccgttcccacgcccccgccagcacttctgtgatgattgccagttgggtattggcttttgccgccagtttgtcgattaacgggaaaaaggcaggtgtcggtaccagcgcttcggtcacaatggtgagatgcgtttcccaaccgcgcgcgagagcttccgcatcagtagtcagtttatctgcggcttccagcaaaacgcgccctcgctccaacaacatcctcccgacattggtgaatttggtacgatggccgctgcggtcaaacagcaccacatccagctcttcttccagtttttgcatggtgtagctaagtgcggaaggcacgcgtcccagctcatccgccgccgccgcaaaactgccccggcgatcgatcgcatccataacccgtagtgcttccagcgttaatgccctttctttggccatttcgttctcattcaggaaatttgaacataccgggcagaatatctggctaacaatgtagcgtccagccccttaccataaaaggaagtaaagagaggtcaagaattatgattactacccgaactgccaggcagtgtggacaagcagactacggatggttgcaggcccggtatactttttcctttggacactacttcgacccgaaattgttaggctatgcctccctgcgtgtgcttaaccaggaagtgctggccccaggtgccgcctttcagccgcgaacctatcccaaagtcgatattttaaatgtgattctggatggagaagcagagtatcgcgatagcgaaggcaatcatgttcaggccagcgccggagaggcgttgctgctctctacccagccgggtgtcagctatagcgaacacaatctcagcaaagacaaaccgttaacgcgaatgcagctttggctggacgcctgcccgcagcgagagaatccgctgattcaaaagctggcgcttaatatgggcaagcagcaattaatcgccagcccagagggtgcgatgggaagcctgcaattacgccagcaagtgtggctgcaccatatcgtgctcgacaaaggcgaaagtgcgaatttccagttgcatgggccacgcgcgtatttgcaaagcattcacgggaaatttcatgcgcttacgcatcatgaagagaaagcggcgctgacctgcggtgatggggcgtttattcgtgacgaggctaacattacgctggttgccgattccccactgcgcgctttgctgatagatttgcctgtctaattgtttttacagggagatgatgatgagtaaaaaattggccaaaaagcgccagccggtgaagcccgtggtggcgaaagaacctgctcgcaccgccaaaaattttggctatgaagagatgttgagcgagctggaagctatcgtcgcggatgctgaaacgcgtttagccgaggatgaagctaccgcgtaaagacaggttgccggatgcggcgaaaacgccttatccggcctacaaaatccaacaacattaacgaattaaacaacccgtaggccggacaagatgcgccagcatcgcatccggcacgatccccaaaacctggcgtttatctggccttgctcgccataatctcgataatctgccgatccgtttgctgcatgctatggcttgctaacgcacacaggttggcaatgctctgctcaacatcatgcgccacaatcccttcattgccggtcacggcggtatcatccagcgccattaacaccgctttccacgcagcgctagcactggtgctaaccttcatcgcgcagctgttgctcgcaccatcgcaaatcatgccgctgacatcgccgatcatactgctgatcgccatgctgatggtttcataacgcccatccaccagccatgccatcccggcggcggcccccattgctgcggtcgttgcggcacacagcgcagacaaacgcggtaactggttatggatgtaaattgcgctcaaatggctaagcatcagcgcacgcgccagccgttcatcatccgctccgaagtgttctgctaccaccaccacaggcattgttgcggtaatcccctggttaccgctgccggagttactcatagccggaagcgtagcgccgcccatacgcgcatcggatgccgcgctggtacgaatcacaatggaactagagagatctttcgccagcaaaccgcgctcgcactgtttttccagcgtcgcgccaatatgcagcccccacttaccgctcaaaccttcctggcttaacgcacaatttagcttcgcggaatcgagaataaagcggatcgccgcaaacgggacttcattgacgaacttcaggatctcagccagcgtcgttctggaaagcaccgtcagcggagactcttgctcgccctctgccacacacgcctgctgggtaaacaccacaccatcgtgcgtctcgatatgcacaatgttggtatgcccgccgacgatggtgacacacgcccacttctcaccgttccagactttggcgcgactgaagaggatttcatcgcaaggttcctggatcttaacggagactttccccgccgccagcagtgctttggcatcggcaattgcctgcgctgttgcgtctttcagcacttccagcccggcgttggcatttccacctaacgcccccagcgccgccgcaatcggcagccccaccattcccgtgccgggaacggtgacgcccagaccgttcttcatcagatttgggctaacccaggcttctacacgttcaaccggaccttccagttctgccgcagcaaccgccgccgccagcgccagactaatcggttcagtacatcccagcgccggttttacttcctcctgaacggcgaggatgtaacgctgccataacggatttaaagtgctatcaaacatattaaaaaccttaaaatttcaggtaaatcaagaaaatgccaggaacggagaaacacacagcaacaaaccagtgacgataatcaggtacagagacatccctttgtatttgtgcaatgctggtactttgtaaaccagccacgccgggatcaggcaccctaccatgccgaaaatcgggctacagatagaggtgaagctcaacaccggtgcgttcagtacgatggcgctccaggccagcaaaatggcgaaaatcatgatgccgcgctgaacgagattttcgttaatcttctcggcaggcatcttgcgacgcaggatgttcattacgatcccttgcgttgcttcgcgaaagcctaaatagacgccaaagaatgcagtcatgacagcaaagatattgagaatgacgctgaccactttcacccacgctgcgccgtcaccgctaataaactgtgcggcaatcgccagcgcggaaatattctgctcataggcttttaccgcttcgtcatgtcccatcgccagcgtgaagctcacggcgtagaaaaagacggtgacaaacaaaatgccaaacgcgatattcattgcccgcaatgctttatgccgcgccacttcaatacttttttcccggctgcgataagagatcaccatcggacttaacgtctggataaacagaatgctcgtcagggtaaacggcagcgtaataatggcgtttttcaccagcagccccagcggcggtaggctaccgacgttatacagatgccacattcccaccatgctcacgcccagcgccgcgaccaccagcagcttggtcagcaccatgccggtgctaattttgaataacaatttctcgccgcgactggagatcgccaccagaatgcaaatcagtaccagaccataaaagggactgtcactcagcaacccttccgtcacgccgaaggtatgcaggtaggaagcactatcgttggtgatggcggtggaatagacgaacatccaaatcaccagcattacgaaatagagcgcacctaacaggatgccccagtttttacctaaataaccgctaatgacgctcgggtaatctttacattctggactttctgccagcgtattaataaacaatcgctgaaacagatacattgccgggtaaccaatcacgctactgagcaaaaatacccacaatcccatcaaaccgacctgcaccgggagaaaaacaatccccgcgccaatcgccatcccgatactcataatcacccagccggtgtcagtactgtcgaatttgatcgcttctcgccactcgctctcactcattccagcacgacccgccggggtcgaagcgtctgcaatgacgcctttattcgatgcaatttccataatttctcgctcaatattttgtagggcttattatttttttccgagccgcatcaaggcgatatgcggtctacgtttttgcaggcgagttattagaataaagaaatgatacgcgcgaggtcagagaaaatcttcacaatcaagactttgaaataacggagatggataagaattttctactaaattaatcgcaggagaatattcattctctatttgcggcagatcacaaaaaaaaggtgcacatttgtgcacccaaggatgaaagctgacagcaatgtcagccgcagaccactttaatggccagtcctccgcgacttgtttcgcggtatttatcgttcatatctttgccggtttcatacatcgtctcgatcactttatcgagactaacacgcggtgcgctggtgcggcgcatcgccatccgcgcggcgtttactgctttcacggcattaatggcattacgttcaatgcacgggatttgtacctgtccggcaaccggatcgcaggtcagcccaaggttatgctccatcgcgatttccgccgcattgcatacctgcgccggactgccgcccagtagttcagttaaccctgccgccgccatactacaggccacgccaatctccccctgacagccgacttccgcgccagagatggaggcgttcattttatacagcgcgccaatagcccccgcggccagaaaatagcgggcaatactccgctcgtttaccggacgacggaacttatcgtaataagccagtactgccggaataatgccgcacgcaccgttagtcggtgccgttaccacgcgcccgccagctgcgttttcttcactaaccgccagcgcgtacatgttgatccagtcgatgacattcatcggatcgttagagatgttatcgctggaaaccagctgacgacgcagcgctacggcacggcgcggcacattgagcggaccaggcagcacgccttcagtgttcatcccacgttcaataccgtcatgcatcacttgccagatacgggcaaaaccggcgtcaatttccgctttgctgcgcagcgctagctcgttgtgcatcatcagaccagatatagacaggccgttgtaatcacacattttcagcagttcacctgcactgtggaaatcgtaaggtacggacgtttcgacatcgtggctcaggccgaagtgttcttcttcgacaataaacccgccgccgacagagtaataggttttacttaatagctcttcctgtcccttccaggcagtgatccgcattccgttctcatggcgaggcaacatttcgggatggaagataatgttctttgctacaggaaaatcaacaatatgcgcaccagatgccactggcagccgcccgctgcgcgttactaactctataaatgcagggatctcatcaatgacaacatcctgcggactgtttcctgccagtcccatgatgatggcgacatccgtggcatggcctttgcccgtcagactcaagctcccgtacagatcgaccacaatatggctcgtcgcggttaataagccgctactttccagccgatcaataaaactttttccggcattcattggccccacggtatggctactggagggaccaatcccaattttgaaaatatcgaatgcactaatcatatccacaccctcggattgccgttcagtgaagtggagcggaacgaccttacgaccgtcccgctcacgaggctttacgcactacgtactgcgatggcttcaatttccagcttcacatctttcggcaaacgcgcgacctgcacacagctccgggtcggataggtcgcctgatgctcatcgaagaactgcttatagacttcgttgatggtggcaaaatcattcagatcggtgataaacacggtcatcttgatgatatcgcccacgctcagcccggcagcaaccacgatcgctttgacgttttcgaggcttaaacgcgcctgatcttgcacatcagccgggatctcaccggtctgtgggcaaaccggtatttgcccggaggtgaagaccatgctgcctaaatcaacgccctgaacataagggccgattgcgcctggggcacgttgcgtttcgataatctttttcatacatcctccggcgtcagagcgcctgggtaaaggtacgactaataacatcctgttgctgttcacgggtcagtgcgttgaagcgcacggcgtagccagagacacggattgtcaggttaggatatttttccgggtgctcgatggcatccagcagcatttcccgattcattacgttgacgttgaggtgttgaccgccttcgacatccgcttcgtggtggaaatacccatccagcaggccgacaaggttggttttacgtactggatcttctttgcccagcgccgcaggaacgatactgaaggtgtagctgatcccatctttggcgtaggtgaacggcagtttcgccacgctcgtcaaactggccacggcacctttgcggtcacgaccatgcatcgggttagcgcccggcgcgaacggtgttccggcgcgacgaccgtccggcgtattaccggttttctggccgtacaccacgttagaagtgatagtcagaatgctctgggtagggacggcgttgcgataggttggcagcgctttaattttcttcataaagcgttcaaccaggtcgcaggcaatgctgtctacgcgctcgtcgttgttgccgtactgcggatattcaccgtcgatttcaaagtccaccgccaggccgttttcgtcacggattggtttcacgcgggcatatttgatggcagacagggagtccgtcgccacgctcaggcccgcgatgccgcatgccatagtgcgatagacatcacgatcgtgcagcgccatcaggctagcttcgtagctgtacttgtcgtgcatgtagtgaatgatattcagcgcgctgatgtactgcaccgccagccagtccatgaagtgatcgaggctgtccatcactttgtcgtaatccagcacgtcgtccatcagcggtgctgttttcggcccgacctgaatcttcagcttctcgtccaccccgccgttaattgcgtagagcagcgttttcgccaggttagcgcgtgcaccaaagaactgcatttgcttaccaatcaccattgggctgacgcagcaggcaatcgcgtaatcgtcgctgttgaagtcagtacgcatcagatcgtcattttcatactgcaaggaagaggtgacgatgctcacctgcgcggcatattttttgaaggcaatcggtaattcttcgctccaaagaatggtcaggttaggttccggtgccggccccatagtgtgcagggtgtgcaaatagcggaaggagtttttggtcaccagcgtacgaccgtccagccccatcccgccgatcacttccgtcgcccagattgggtcgccggagaacaggctatcaaattccggtgtacgcaggaagcgtaccatacggatcttcatgatgaagtgatcgatcagttcctgtgcctgctgctcattgagtacgccagctttaaagtcgcgctcaatgtagatatcgaggaagcttgccgtgcggcccaggctcatcgcgccgccattttggcttttcactgccgccagataagcgaagtagagccactgcaccgcttcctgcgcattctgcgccgggcgagagatatcaaagccatatttcgccgccatttcctgaatctgcaacagcgcatgacgatgctctgccagctcctcacgcagacggatggtggcttccagatcctcgcctttttccagacgagactggagatcggcaaattgcagttcgcgttcacgtaccagataactgatgccatacagcgctacgcggcgatagtcaccgataatgcgcccacggccatagccatctggtaaaccggtcagcacgccagatttacggcagcgcagcatatccggactgtaaacatcaaatacgccctggttatgggttttacgcagatcggtaaacagatattcaaattcactgtccatttctcggccataggcgtggaaactacttttaatcatattaatgccaccgaacgggtgtagcgcacgtttcaacggcgcatccgtttgcaggccaacaattttttccagcggctggttaatatatcccgcatcatgagcggtaattgtggtggcaatattggtatcgaaatcaaccggcgcgtgggttgcattttcgatacggatgccttccattactttttcccacaattccgtggtggcaggcgtcgcttcggcgaggaaagattcatcgccttcatacggtgtatagttatgttgaataaaatcgcggacattaatttcgtttttccagtccgtacctttaaagccaagccatgcgtcggcgtacagcttatcgctggtatcaatatctaccttcatgaaaaataatctctctacaatacttcaactaaattatgcaaattctgcgggcgcgttaactttgcctaaatgaatggcatccaaagcaatcattttttcttcgttagtcggaataacggcacaaatgacacgcgcattttcactggaaacaattcgctcaccacaggagttagagcgattattcatttctgtatcaatctctaagcctaatacagccaaatgttccatgaccagacgacgaattaagctactattctctcctattccgccggtgaatataattccatccaggcgacgtaaactagctgcgtgtccggcaatatgacgggcaattcggtgaacaaaggttttaattgccagttgcgcgcgttcgtgaccttcatgccaggctttttccagaacacgtaaatcgctagaaagaccggaaatacctaataatccgctctctttattcactacgcgttccaggtcacccaggctctggttggtttggctggcgacccaggacatcgcaccaaagtcgacatcgccactgcgggtacccatcatcaagccttccagcggcgtcattcccatactggtatcaacactctgaccgttgcgaaccgcgcagatactcgcgccattgccaagatgcgccacaaccaggccggagtcatcttccgccagattcagcaggctatgtgcgcgctgggaaacatagcggtggctcgtgccgtggaaaccataacggcgtacacctaactcttcataatatttccacggcaggccgtataaataagcttccggagccatcgtctggtggaaactggtatcaaataccgccacctgagttacgcccggaaataattgctgcgcgctttcaataccacttaaattggcgtaattatgcaggggtgccagtggagaaacgcgacggatattatcaatgacttcatcggtaataatggcggactcggtaaaaatactgccgccgtgagcgatgcggtggccaattaaggccacactgtcatttaaattccgtttttccagttcaaatgcaattgccttcaatgcaccttcgtagctgtggtgagccagcggtgctggctctcccccatttacggataagaatgcattttcgctgttaataccgtcggcaataccactcattaatacttcacagtcgctggcatcgagcacggaaaacttaatgctagagctaccacagttaataaccaaaacaaccggaaattcattcatctcttttctcatcctgagttacggattaaaacagtttgtatacgatgttcaggatggtcagcagaccaatcacggtaacaaacacgttatccagacgaccacggtatttcgccagagacggcgctttacggatggcatacatcggcaacaggcacagcagggatgcgataatcggtgcgcccatggcttcaatcaggtcaaggatgttcgggttggcgtaggcaacaacccaggtggagcccatgatgaagatcatgctgatagtgttcagtttacccaggctcactttagttttgtcgcctttataaccaaacttcaggaccaggccattcagaccttccagcgttcccagatagtgaccgaagaaagatttgaagatagccacgagtgcgatgatggaagccgcatattccagtgtaatcgcgaacgttgttttggtaccggtcatggacgcaaagtggttagccagataagaaagcactggaatattctgcgctttggcttccgccatgttggccggagacagagtaaacaggcagctaaaggcaaagaacatcaccactgcaaccatcagcatgctggcacgagaaatgatttgggaacatttacgttcggtgaagtcgcgaccgaagtctttctcatactcttcacgcttagaaaccacgaaggaagagacgattgggctgaagttaaaggagaaaaccatgatggaaatccccagccagacagtgatcaggataccgtcatgaccggttaagctcaggctaccgaggtcaacctggtcgataactgcagagttccagtaagggatcaggctcaaagaaatcagcaccaggctggcgataaacggccataccaggtagctcatcactttaaccatcagatccttaccaaaccagatgacgaaagccatcagcagcaacaggaacagcgccacaaagccgcgattcagcggtgcaaagccgagctggttttcccagaacgtcataaaggtattggtaatagtaacgccataaatccacagcagtgggcaaatcgcgaagaagtacaggaacgtgataaccacgccgccagttttaccaaaatgctcttccaccgtttccgtaatgttgccggaagggttagagccagaaagacacagacgcgccagcgcccggtggcaataaaacgcgatggggtatgccaataccaacatcagaagaatcgggatcagtccgccaaaacctgcgcggatagggaagaacagcaccccggcgccgattgccgtaccaaacaagcctaacgtccatgtggtatcacttttacgccaggagctttgttttgtctggctggatacaatgctatcactagtactcatatcctatcctcaacgaattaattaagcgtcaacgaaaccggtgatttgagagacgcgagaaagatcgatattgccgccggaaataatactgacggtttttctgttttgaatatattggtctaatttaccgcttaataatgcagcacatgccagagcgcctgcgccttcggtgacgactttattgcgctgaattaaggcaatcatactgtttctgatttcgtcttcgctgaccagcacgatgtcatcgactaattcacgaacgatttcgtaagttaaattacccgggcgggagacatcacaaccatccgccagggtgccggtagttcggtgcgtggttatttctccggagtggaaagaagccgccatgccgtgaacgttttcagactgtacgccaataacacgaatggtcgggttaatagatttaattgccaccgcaataccagcaattaaaccgccaccaccaattggcacaatcacgttatcgacatcatagagatcttccataatttccagaccaatcgttccctggccagcaatcactttcggatcatcgtaaggtgggataaaaatacggccttccatttcgacaatttcgctcactttagcgatagtgtcgttgaagttatcaccatgcagaacgacttctgcggagtagtcgcacgttgccgctactttggattttggcgcaccttttggcatcaccactttaccgtcgatacccagcatcgcgcaggagagggaaaccccttgcgcatggttgcccgcagaacaggccaccacgcctttgcgtttttccgcatcggtcagactacttaatttattaaatgcgccacgaattttaaaactacccgtacgctgcatattttcaaacttcaggaatatttcacctttgcaacgttcactaaaatagttggagcgaggcatgcctgttttataaattcgcccagccagtcgttgtttcgcttcaataatgtcatcaatagcaaccggcagatcgtatgtaatatgcattataaaacctcttcgcctgaattaaatatgtaggtaaccgtaaccgacacctgcaagacagacaggtggattatttatgtttaaataaaaacaaataattaaccaacttctattaattgccttcgtctacacccattataagaactatactctttggctaattccaccaaaacgcttgctgcttttttaatacgataatttttgctccataccgcggcatattgtgccacaggtaatgtttcttcaaccggaatagtaataaattgattagaaccaaaaggactcgtcatatcacaaggaattacagttaagaaatcagcattgagaacaagattataaattgtcacgacactgtcggttttaacgatgttttcaatactgatgccatttctttgtaacgtagtaagcagttcgctgtagtaccccatattagtttgtggcaacacccactgttcgttcttcaagctctccagcgtggtggtgccggtgcatgttcgggacttactggctaccagcacaaactcggactcgaacagcggctcaacatgtaaatcctgaagcttcatttctgcacttaacgtaccaatcgcaaaatccagtcgaccgtcgcggattgccggtaagaagctagacagttgcgcttcatacatagaaacctgcgctttcgggaacacctctttgaacttgttgatcatcccactcataaaagtaaaaccaatcaaactaggaaaaccaaaactgacttccaccaccgcctcagaagacataccgcttatctcattaaccatatttttcatttcacgggtaatggattcggaacgggagagtaacaattgaccggcaggtgttaatgttacaccggtatttttccgcaccactaattccacaccaaaataatcttcaatatcgttaatgattttactgacggccggttgagttaaccctaattcttttgcagcgctgccgatagaaccacttctaatgacttcctgaaagactaccaggtgctgcgttttcggaagaagaatagtgctcataacgacctacgttaattacctcattgacggcatgaagtgtatcaaaatgaaatgaacaggatatgtgcgaccactcacaaattaactttcaatactttccagagtatcgttattacaattaaatacctttaaatatcaacaagttaaagtataaaaatcagcataaaccctgatttttgtcaaaaaaaatgacggggataaccatattttatggcgataacatcattcgttatgtggttaatacaaaaaaggggctgagaccatatttcaagcaattaccggataattaccaggcaaaatttgagttaaatttaatgagcaagttcagtaattttattataaataaaccatttagtgtgataaataatgcggcatgtcacatttttagtcgctatttgttggagaacaaacatttattttatcaatattttaaaattagcaatacatgtattgatcatctcgaacaattgattaacgtcaactttttctcttctgacaggacgagtttttgtgaatgcaatcgttttccataaattcttctcccctcataggcgacgaatagcattttgtgttgaggatcacaaaacgaataattgctgatcgccgcgataaggtcagacaaagacaacaagggaaattttcacagagcttttgatcggcgtaggccacagaatgttgcttcgtttactgtaacgccgggtaaatgagcgttttttgatagtgcgaaagaaccctgcgaggaaaataagcatctattattgtttgtcatgatgacaaggcaggcatcaatgaaaggcttcccaattgcgcatatttttcaccctagtatcccgccaatgcacgcagtggttaacaatcacaatagaaatattgattattggacggtaaaaagaaagtttgcagaaattgtctccaccaatgacgttaataaaatttacagtataagtaatgaactgcggagagtattatctgcaataactgcattgaatttctatcatggcgatgttccttctgtcatgatccgaatccaaccggaaaatatgagtccattcattatagatatttctacaggagaacatgatgattatatcatacaaacattagatgtaggcacttttgcaccttttggtgaacaatgtacttgcagtgccgtcaataaaaaagagctggaatgtattaaggagacgatttctaagtattgtgcaaaattcacccgaaaagaagccatcttaaccccccttgtgcactttaataaaaccagcattactagtgattgttggcaaattctcttttttagtcccgatcattttaataatgatttttattgattatttataaaggataaaataatgttccctgttagtagtattggtaatgatattagtagtgatttagtccgtcgaaaaatgaatgaccttcctgaaagcccaacaggaaataacctcgaagcactagcaccaggtatagaaaaactaaaacagacctctattgaaatggtcactttacttaacacgttacaacctggtggaaaatgcattatcactggtgattttcaaaaagaattagcgtacttacaaaatgtaattctttataatgtcagctctcttcgtctggattttttaggttataacgcccaaattattcaacgaagcgacaatacttgtgaacttaccattaatgaaccgttaaaaaaccaggaaatatccacaggtaatatcaatattaattgcccattaaaagatatttacaatgaaatcaggaggttaaacgtaatttttagttgtgggactggagatatcgttgatctatcctctctggacttacgtaatgtcgatttagattattatgatttcacagataaacatatggctaatactattttaaatccttttaaattgaatagtacaaattttactaatgccaacatgtttcaggttaattttgttagtagtacacaaaacgccacaatctcctgggattatttactaaaaataacgcctgttttaataagcattagcgatatgtattctgaagaaaaaatcaagtttgtcgaaagttgtttaaatgagcctggagacattaccgaagaacaattaaaaattatgagatttgcaattataaaatctataccaagggcaactcttacagataaattagaaaatgaattaacaaaagaaatatataaaagcagtagcaaaatcatcaattgcttgaacagaattaaattaacagagatgaaagaattcagtagtgaaaaaatatatgattacatcgatataatcattgaagattatgaaaataccaaagaaaatgcttatctggtcgtcccccaaattaattatactatggatttaaacatagaagactctagcagtgaagagttacttagtgataataccctcgagaaagacgaaaattctccggacaatggctttgaggtcggggaatataacacatatgaagcatataacagtgagaagcaatattttaccagagaggactatacgtatgattacgaccttttaaatgcaatataaacttaataacttcttacaaagtctattattaataccgtagatatttattcatcttaccctgtgcaccaaaagcaaaaactcactgacgcgggtttgaaactgatggcaaccgcaaaaatgcctgatgcgctacgcttatcaggcctacgccatctctgcaatatattgaatttgcgtgcttttgtaggcaggataaggcgttcacgccgcatccggcatgaataaagcgcactcaacaatctgaaacccgccggaacggtttattacgtacatcaggtaaaactgaccgataagccgctttcttttgggtatagtgtcgtggacagtcattcatctttctgcccctccaaaagtaaaaacccgccgaagcgggtttttacgtaaaacaggtgaaactgaccgataagccgctttcttttgggtatagtgtcgtggacagtcattcatctttctgcccctccaaaagcaaaaacccgccgaagcgggtttttacgtaaaccaggtgaaactgaccgataagccgctttcttttgggtatagcgtcgtggacagtcattcatctttctgcccctccaaaagcaaaaacccgccgaagcgggtttttacgtaaatcaggtgaaactgaccgataagccgggttctgtcgtggacagtcattcatctaggccagcaatcgctcactggctcaagcagcctacccgggttcagtacgggccgtaccttatgaacccctatttggccttgctccgggtggagtttaccgtgccacggactgttaccagccgcgcggtgcgctcttaccgcaccctttcacccttacctgatcccgcttgcgcgggccatcggcggtttgctctctgttgcactggtcgtgggtttcccccccaggcgttacctggcaccctgccctatggagcccggactttcctcccctccgcccgtctcccccgaagaggacgacgacgaagcggcgactgtctggtcagcttcggcgcgcagtatagagggtttgcgcgcccttgtcaccccgcgttgcgcattccaatcgccagtgtcgcggcgatattacgactagcacggcagatattgtcataagccccgcggaatgcttcgtccaacgtacctatgctggtcaatacgctgaagaccgcatcaatgccatgctgatgtacaacgccaacatcatcggtcaggctacccgcaatgccaatcaccggtttatggtacttcttcgccacgtttgcgacaccaatcggtaccttcccgtgaatactctggctgtcaatacgcccttcaccggtgatcaccagcgtacaatcgtgaatatgttcctccagattcagcgccgtagtgacgatttcaataccacttttcagttccgcaccaagaaacgccattagcgccgcgcccataccacccgcagctcctgcaccggggacatctttcacatcaacatgcagcgcttttttaatgacctcggcatagtgagagaggttattgtccagctcaacaatcatcgcttcactggctcccttttgtgggccaaagatgcggcttgcgccgttatcgcccaccagcggattggtgacatcacaagcgacgcgaatgacgcaatcttttaagcgcggatcgaggccggaaatatcaatatcattcagagtattaagactaccgccgccaaaaccaatttcattgccgttggcgtcgcataatttcgcccccagcgcctgtaccatgcctgcgccgccatcatttgtagcgctgccgccaatgccgataataatgtttgtcgcaccgctctccagcgcctgcaggattaactcgcctgtgccgcgactagtggtcacgagtggatcgcgtttttccgcaggtaccagctccagcccactggccgccgccatttcaataaacgcggttttgccatcgccggagatcccccaactggcattcactttctcgcccagcggccctgtaacccaggcgtgacgttcagccccctgggtggctgcaatcatcgcttccaccgttccttcgccaccgtcggcaaccggaacagaaacgtactgtgcatcaggaaaaatttcccgaaatcctttttctatcgcctgcgcaacctcgctggcagataaactttctttataagagtctggggcgattacgattttcatacctatgcctgttaccacatgacgccggagggcgtttctcttattcggcctggattccaggcccggattgcaatacgccatccgggcacgacgtcattaacgagtaacttcgactttcgccagtttttcgtagtagcacgccagggcgctatgatccgccgttcctaaaccatctgctcgcagtgcctgcatcatctccataaccgcagctgtgagcggcagttgtgcgccgacgccgtgagaagtatccagcgcattcgccagatccttaatatgcagatcaatacggaagcccggcttgaagttgcggtccatcaccatcggcgctttggcatccagcacggtactgcccgccagtccaccgcgaattgcctgataaaccaggtccgggttaacgcccgctttagttgccagcgttaacgcttcactcatcgcggcaatattcagcgccacaatgacctgatttgccagtttggtgacgttacctgcaccgatttccccggtatgcaccacggaacccgccatcgctttcatcaaatcatagtatttgtcgaaaatagccttgtcgccgcccaccatcacactcagcgtaccgtcgatggctttcggttcaccgccgctcaccggagcatccagcatatcaatgcctttcgctttcagcgcttcgctgatttcacggcttgccagcggtgcgatagaactcatatcgatcaataccgtacctggcttcgcgccttcaataatgccattctcacccagcgccacctctttcacatgaggggagtttggcagcatggttatgatgacgtcgcactgttcagcgatcgctttagccgtagacgctgtttctgcacctgcagcaatcacgtcagcaatagcttctgggttacggtcagcaaccaccaggctgtaacctgctttcagaaggtttttactcattggtttacccataatccccaggccaataaaaccaactttcatagtcatatcaatcatctctcttgttgcggtggtggttattttttaaaggtatcagccagtttctgagtggcagagcggaagacgccgagatcgctgccgacagccacaaacgtcgcgccccattccagataacgacgcgcatcggcttcgaccggcgcgaggataccgctgggtttgccgtgcgcgctggcacggttaaaaatgtgctgaattgctttttgtacatccgggtgacttgcattgccgagatggcctaatgccgcggccagatcgctggggccgacgaagatgccgtctacgccttcggtagcggcaatggcatcgacgttatctacgccctgctgactttctatctggaccagaatagtgatgttcttgttgctctgagcgaaataatccgccacggtgccaaacatattggcgcggtgagaaacggagacgccgcgaatgccttccggtgggtaacgggtacttgccaccgccagctctgcttcctcttttgtttctacaaaaggaatcaggaagttatagaaaccgatatccagaagacgcttaataattaccggctcgttggtcggcactcgcactactggcgcgctggcgctgcctttcaaggccattaactgcggaataaacgtggagatatcgtttggcgcatgttcgccatccagcaccagccagtcaaacccagccaaaccaagaacttcagtgctaatcgggttagagagtgcactccagcaaccaatttgtacctgtttcgcagccagtgcggctttgaatttattcgggaaaacatcgttattcatcgcttatacctttgcttatttctgcaattccatacgtttaatgtcgccaactacgaagaggtagcagaccatcgccatcagcgcactacatcccacgaaaaccagtgctgcattgaaggagtgcagttcacttaccaggtagccaatcaccagtggagtgacaatggaggcaacattgccaaagacgttaaagacgccgccgcagaggccaacaatctctttcggcgcggtgtcagaaatcaccggccagcccagcgcaccaaatcctttgccaaagaaagccagcgccatcagcatgaccaccagcgtggtgttgttggtgtagttacataagatgatggtggaagccagcaacattcccagcacaatcggtagcttacgtgccagggtcagggataaaccgcgtttgatcagataatcgctgaagacacctcccagcacgccgcccgcaaaaccacacagtgctggaatgctggcgaccagacccactttcagaatgctcatgcctttttcctgcaccagataaatcgggaaccaggtgaggaagaaccaggtgatggtgttgataaaatattgtccgaaaaatacgcccagcatcatgcggttagagagcaattgcttgatgtaatgcagtttgggtccgcttgctgccgcactgcccggctttttgtggtccatatcgaccaccgcgccattttcagagataaacttcagctcttccgcagacatacgtgggtgatctgtcgggttatgaatcaacttgatccacagcgccgtcagcacaaaaccaatcacccccataacggtaaagacgtgctcccagccccaggcgaaagtcagccagccaagcagcgggctaaagagcgccaggctgaaatattgcgcgctgttaaagatggcggaggcagtaccacgttctttcgtcgggaaccaggcggcgacaattcgggcgttcgccgggaaacttggcgcttcgctgaagccgagcataaagcgcataaagaacatggagatccctgcccaggccagcgggaacatatcaacaaagccttgcaggaaggtgaataggctccagaaaaagaggctgtaggtgtaaacttttttgctgccaaacttatcaagcagccagccgccggggatttgcatcagcaagtaggcccagccaaaagcggagaagatgtaacccatgctaaccgcacttaactgcaactcttttgccacttcggtaccagcaatagacagcgttgcacgatcggcgtagttaacggcggtaacaataaaaataatcagtaatattaaatagcgggtatgcacgcctttctttttttcgtcaacggtgtccagaatcattttatttacctcgggtacttatgctgatttttattattatggggaaggtgttatttatgagtttcatttatgccgtaacgacaatgaactcgggaattagtataagcagcgcgagaataataatcattgtgcaaatgctaatttaattaatactatttaaatattattttgagcatatgcacataaggttgcgcgctaaagcacagatttgcgctttaccttaccgggcggcactgcaatccctgaaatgattgacattgatcacatttctgcgtttaaactcctgacattcttatttcacccaatgaagtcatttatttttaaatgagaccaggtcctcattttaataacccctggctggagaatattgcacaatggccaacatcgaaatcagacaagaaacgccaactgcgttttatataaaagttcacgacacagataatgtggcaattattgttaatgataatggcctgaaagcaggaacgcgttttccggatgggctggaattaattgaacatattccccaggggcataaagtcgcattgctggacattccggctaatggtgaaattattcgttatggcgaagtgattggttacgccgtgcgtgcaatcccacgcggaagctggatcgacgaaagtatggttgtactaccggaagcgccgccgttacacacgctgccactggcaaccaaagtcccggaacccttaccgccgctggaaggatacacctttgagggctatcgcaatgccgatggcagcgtgggcaccaaaaacctgctcggtatcaccaccagcgtccactgtgtggcaggcgtggtggactatgtagtaaaaatcattgaacgcgatctgctaccgaaatacccgaacgtcgatggcgtggtggggctgaatcatttgtacggttgtggcgtggcgattaacgcaccggcggcagttgtacctatccgtaccattcacaatattagcctgaatcctaactttggcggcgaagtaatggtgattggcctgggttgtgaaaagttgcagcctgagcgcctgctgactggaacggatgatgtgcaagctattccagtagaaagcgccagcattgtcagtttgcaggatgaaaagcatgtcggttttcagtccatggtcgaggatattttgcagatcgccgaacgccatctacaaaaactgaatcaacggcagcgagaaacctgcccggctagtgaactggtcgttggtatgcagtgcggtggcagcgatgcgttttctggtgtaacggcaaacccggcggttggctatgcgtctgatctactggtgcgctgcggcgcaacggtgatgtttagtgaagtaacggaagtgcgtgacgcgatccatctgctgacaccacgcgcagtgaacgaagaggtcggcaaacggctgctggaggagatggagtggtacgataactatctcaatatgggaaaaaccgaccgcagcgccaaccctagcccgggcaacaagaaaggcggtctggcaaacgtggtagagaaggcactcggctccattgctaaaagcggtaaaagcgcaattgttgaagtgctgagccccggtcaacgcccgactaaacgcggattaatttacgccgcgacgccagccagcgattttgtctgtggcacgcaacaggtggctagcggtatcacagtgcaagtgtttacgaccggtcgtggtacgccgtacggcctgatggcggtacccgtcattaaaatggcaacccgcaccgagctggcgaaccgctggtttgatttaatggatattaatgcgggcaccatcgctaccggcgaagaaactattgaagaggtgggctggaagttgttccactttattctcgacgtcgccagcgggaagaagaaaaccttcagcgatcaatgggggctgcataaccagctggcggtgtttaacccggcaccggtgacctgatttcttttggaacgtccctcgcaaaacatggccttagtgccatgtttttattgtttaaagcccccacgtccattaataatgcatttgcattaccttagttcaagcttataatttgagcagaaaacaggctgtaaaaggacagtgaatcatgcccgctaatgctcgctctcacgctgtactgaccactgaaagtaaggtcacgatacgcggacaaacaactatccccgcgccagtgcgtgaggccttaaaactgaagccaggccaggacagcattcattacgaaattctgcctggtgggcaagtatttatgtgccgactgggagatgaacaggaggatcatactatgaatgcatttttgcgttttctggatgcagatatccagaacaacccgcaaaaaactcgtccattcaacattcaacaaggaaagaaacttgtcgctggcatggacgtcaacattgatgatgagattggcgacgacgaataatggattttccacaaagggttaatggttgggcgctatatgctcatccctgttttcaggaaacctacgacgctttagttgccgaagtcgagacattaaagggaaaagatcctgaaaattatcagagaaaagccgccacaaagttattggcggtagtccataaagtgattgaggagcatatcacggtcaatccaagtagtccggcattccgtcatggcaagagcttaggctctgggaaaaataaagactggagtcgggtaaaatttggtgctggtcgttatcgtctcttctttcgttatagtgaaaaagagaaagtcatcattctgggatggatgaacgatgaaaacactctgcgcacctacggtaaaaaaacagatgcctataccgtattcagcaaaatgttaaaaagaggacatcctcctgccgactgggaaaccctcacccgagaaacagaagaaacccattgatggtgttcacaatgcccgccgaacgcattcgtgttgaccagcgggcatcctttctcactccccgaccagaatcacttcaaccccagcctttcgcagtccttccaggctatccgcaggaatgccttcatcaacaatgatcatgtcgatacgttgagtatcaatgatcttatgtaaactggaacgattgaacttactggaatcggtgaccacgatgatccgttccgcaacttcgcacatccgacggtttaaacgagcttcatcttcattatgtgtgctgacgccgcgctccagatcgatcgcatctacaccaagaaacagcatatcgaagtggtaattttgcaggctttgctcagcctgatcgccgtaaaaagattggctctgacggcgcaaatgcccgccggtcatcagcagctcaacgccttccgcttccagcaacgcattagccacgttcataccgttggtcatcgcaattacgtcagtgtgcttgcgcatcagacgagcaatctcaaaagtggtggtcccggaatcgaggataacccgatgacctggctgaatcaactcaacggcagctttcgcaacgctgcgtttcatcgcggtgttcagtgcgcttttatcttccacacttggctcgacactcggcgtcgtgctatcgcagatcaacgcgccaccataggcacgcacagcgatcccctgcttttccagaaacgccagatcgttgcggatcgtcacagtagatacgccatacaatgcgctcagatcgttaacctgcacactcccttgctgtcgcagacgctgaatgatctgttctcgtcgctcgctggtgccagtcactcgcttctcaccactagcgtcggtattactcatagtaagtcctttcgtaaaactttcgtttcatttcgttttgcctattaacgcctttctattaagcaaatgcaagcccaccttgcccattgacgcaagctactctcgtttcagtgactttcattatgtttcttttgtgaatcagatcagaaaaccattatctttcgttttatttttatctcaccatgacgcagtatcaactgaaacaaaacgaaagattaatatcgcagtaatctgaactggagaggaaagtgaaacatctgacagaaatggtgagacagcacaaagcgggcaaaacaaatggaatttatgccgtttgttccgcacatccgctggtgctggaagctgcaatccgctacgccagtgcaaaccaaacgccgttactgattgaagcaacctccaatcaggtagaccagttcggcggttataccggaatgacgcccgccgattttcgcggctttgtttgtcagctcgccgacagcttgaatttcccgcaggatgcgttgattctgggtggtgaccatctggggccaaaccgctggcaaaacctgccggccgctcaggcaatggccaatgccgatgatttgattaaaagctacgttgcggcaggattcaaaaaaatccaccttgattgcagcatgtcctgtcaggacgatccgattcccttaactgatgacatcgtggctgaacgcgccgcccgtctggcgaaagtggcggaagaaacctgtcttgaacactttggcgaagccgatctggagtatgtcattggtaccgaagtgccggtacctggcggcgcgcatgaaaccttaagcgagctggcggtcaccacgccggatgccgcccgcgccacgctggaagcccatcgtcacgcctttgaaaagcaaggtttgaatgccatctggccacgcatcattgccctggtggttcaacccggcgtcgaattcgatcacaccaacgttattgattatcagcccgccaaagcgagcgccttaagccagatggtcgaaaactacgaaacgctgattttcgaagcgcactctaccgattatcaaacgccgcaaagcctgcgccagctggtgattgaccactttgccattctgaaagttggcccagcgctgaccttcgccctgcgtgaagctctgttctctctggcggcgattgaagaagaactggtgccagcgaaagcctgttctggtctgcgtcaggtgctggaagacgtgatgctcgaccgcccggaatactggcaaagccactaccacggtgacggcaacgcgcgtcgtctggcgcgtggttatagctacagcgatcgcgtgcgctattactggccggacagccagattgatgacgctttcgctcatctggtacgtaatctggcggatagtccaattccgctgccgctgatcagccagtatctgccgctgcagtacgtgaaagttcgctccggcgagctgcagccaacgccacgggaactcattatcaaccatattcaggacatcctggcgcagtaccacacagcctgtgaaggccaataagcaaaacaaagaggaacacgctatgccaaatattgttttaagccggattgatgaacgcttgattcacggtcaggtcggcgttcaatgggtcggatttgcgggggcaaatctggtgctggtagccaacgatgaggttgccgaagatccggtacaacaaaacctgatggaaatggtactggcagaagggatcgccgtacgtttctggacgctgcaaaaagttatcgacaacattcatcgcgccgccgatcgacagaaaatcctgctggtttgtaaaacacccgccgatttcctgacgctggtgaaaggtggcgttccggtgaatcgcattaacgttggcaatatgcactacgccaatggcaaacaacaaatcgccaaaacggtttctgtggatgcgggcgatatcgcagcatttaacgacctgaaaaccgctggggtggaatgcttcgttcagggcgtcccgacagagcctgctgtggacctctttaaattactttgagggattcatcatggaaatcagcctgttgcaggcatttgcgttgggcattatcgcctttatcgctggcctggatatgtttaacggcctaacccatatgcaccgcccggtggtcctcggcccgttggtcgggctggtacttggcgatctgcataccggaattttaaccggcggtacgctggaactggtgtggatggggctggccccgctggcgggcgcacagccgcctaacgtgattatcggtactatcgtcggcacggcgtttgccattactactggcgtgaaacccgatgtcgcagtaggtgtcgccgtacctttcgctgtcgcagtacagatggggattaccttcctgttcagcgtgatgtccggcgtgatgtctcgctgcgacctggcaacaaacccgcgccgcatttgatgctggtgccgacggcctggtgcattgctataacgggatgacaggtttacatcaccgcgaaccgggaatggttggcgcgggattaacggacaagcgcgcctggctggaactgatagccgatggtcatcatgtgcatccggcggcaatgagcctgtgttgttgctgtgcgaaagagagaatcgtactgatcaccgacgcgatgcaggcagctgggatgccggatggtcgctatacgttatgtggtgaagaagtgcagatgcacggtggcgttgtccgtaccgcgtctggtgggctggcgggcagtacgctgtctgttgatgcggcagtgcgcaatatggtcgagttgacgggcgtaacgcctgcggaagccatccatatggcgagcctgcatccggcgcgaatgctgggtgttgatggtgttctgggaagccttaaaccgggcaaacgcgccagcgtcgttgcgctggatagcgggctacatgtgcaacaaatctggattcagggtcaattagctagcttttgatagtttgctcctttattgggccttcacttcccccgtaaggcctttctttttctttcgttttgatctgtgcagcggtgtcggatgcgacgctaacgcgtcttatccgacctacagttggtgaccgcaaggccggataaagcgtttgcgccgcatccagcaatcccttttgcttcctttatcttttctttcaacgatcacaaatttcgttttatttcttttttctccattgaactttcagtttcttttctatagattttaatcaacgaaagacatcaccaagtgaaatgaaacgaaaggcaagtgaaagcgacaacgcccgacgtcaagttcatcagactaaggattgagttatgccagaaaattacacccctgctgccgccgcaaccggtacatggactgaagaagagatccgccatcagcctcgcgcatggatccgtagtctcaccaacatcgacgcgctacgttccgcgctcaataacttccttgaaccgttactgcgcaaagagaatctgcggatcatcctgaccggagccggaacgagcgcatttatcggtgacatcatcgcgccgtggctcgccagccataccggtaaaaacttcagcgccgtaccgaccaccgatctggtcaccaatccgatggactacctgaacccagctcatccgctgctgttgatctccttcggtcgatccggcaacagcccggaaagcgtcgcagccgtggaactggcaaatcaatttgtaccggaatgctatcacctgccgatcacctgcaacgaagcgggcgctctttaccaaaacgcgatcaacagcgataacgcgtttgccctgctgatgcccgcagaaacgcacgatcgcggctttgcgatgaccagcagcattaccaccatgatggccagctgcctcgcggttttcgcacctgagacgatcaacagccaaaccttccgcgacgtggcggatcgttgccaggcgatcctgaccagtctgggcgatttcagcgaaggtgtgtttggttacgcaccgtggaaacggatcgtttatctcggtagcggtggcttacagggcgcagcacgcgagagcgcgctgaaagtgctggaactgacggcgggtaaactggcggccttttatgattctccaaccggattccgtcatggaccaaaaagcctggtcgatgacgaaacgctggtggtggtatttgtctccagccacccttacacccgtcagtatgatcttgatctgctggctgaacttcgccgtgacaaccaggcaatgcgtgtaatcgccatcgccgcggaaagcagcgacatcgtcgctgccggtccacatatcatcctgccaccgagtcgtcactttatcgacgttgagcaggcattttgcttcctgatgtacgcccagacgtttgcactgatgcagagcctgcacatgggcaatacgccggataccccaagtgccagtggcaccgttaaccgcgtggtgcaaggcgtaatcattcatccgtggcaggcataagaggatcgcattatgagcattatctccactaaatatctgttacaggacgcccaggccaatggctacgcggtgcctgcttttaacattcataacgccgagacgatccaagcgatcctcgaagtgtgcagtgaaatgcgaagcccggtgatcctcgccggaacgccggggacctttaaacacatcgcgctggaagagatctacgccctgtgtagcgcctattccacaacctacaacatgccactggcgctgcatctcgaccaccacgaaagcctggatgatattcgccgtaaagtccacgcaggtgtgcgcagtgcgatgatcgacggcagccacttcccgtttgccgagaacgtgaagctggtgaaaagcgttgttgacttctgccacagtcaagattgcagcgtggaagcagaactgggccgcctgggcggtgttgaagatgacatgagcgttgacgccgaaagtgcattcctgaccgatccacaagaagctaaacgctttgtcgaactgactggcgtcgacagcctggcggtagcgattggtacggcgcacggcttatacagcaaaacgccgaagattgatttccagcggctggcggaaattcgtgaagtggtggatgttcctctggtgctgcatggtgccagcgatgttccggatgaatttgtccgtcgcactattgaacttggcgtcacaaaagtgaacgttgccacagaattaaaaatagccttcgctggcgcggttaaagcctggtttgcggaaaatccgcagggtaatgatcctcgttattatatgcgcgtcggaatggatgcgatgaaagaagttgtcagaaataaaattaatgtctgtggtagtgcgaatcgaattagtgcataatcattagttttttatgatttatcccaatgtacttcccgattaatatcggggagtgccttaatggaaaaggagataactaaaccttaataaatacatcactacaatatcgcaacaataatatatttaaaaaaattatattattcaactttatggtgaggattacacaatgaccagtccaaatattctcttaacccgtattgataaccgtctggttcacggtcaggttggcgtgacctggacatccaccatcggtgcaaatctgctggtagtcgtggatgatgttgtcgctaacgatgatattcaacagaaattaatgggtattaccgcggaaacctacggctttggcattcgtttctttactatcgaaaaaaccattaacgtcatcggcaaagctgcaccacatcagaagatcttcctgatttgccgtacgccacaaacggtacgtaaattggtagaaggtggtattgacctgaaagatgtcaacgtcggcaatatgcatttcagcgaagggaaaaagcaaatcagcagtaaagtttatgtcgatgaccaggatctcacggacttacgttttattaaacaacgtggcgtgaatgttttcattcaggacgtccctggcgatcaaaaagaacaaatccctgactaaatctaaaatcgccttaatattggtttgaggtaataaaaatgcatgaaataaccctacttcagggattatccctggcggcgttagtttttgttctggggattgatttttggctggaagccttatttttattccgcccgataatcgtttgtaccctaactggcgctattctcggtgatattcagactggcttaattaccggtggtctgacagagttggctttcgccggattaacccctgcaggtggtgttcagccgcccaacccgattatggcgggtctgatgaccaccgtcattgcatggtctacgggcgttgatgccaaaacagcaattggtcttggcctgccgtttagtttgttaatgcagtacgtcattctgttcttctattccgctttcagtttatttatgaccaaagccgataaatgcgcgaaagaggcggatacggcagcgttttcccggcttaactggacaacgatgctcatcgtcgctagtgcgtatgcggtgattgctttcctctgtacttacctggcacagggggcgatgcaggcgctggtgaaagcgatgcccgcctggctgacccacggctttgaagtggctggcggtattctgcctgccgttggttttggcttgctgctgcgcgtaatgttcaaagcgcaatatatcccttacctgatcgccggtttcctgtttgtttgctacatccaggtcagcaacctgttgccggttgccgtactgggcgcaggctttgcggtgtatgagtttttcaatgcgaaatcccggcagcaagcgcaaccgcagcccgttgccagtaaaaatgaagaagaggactacagcaatgggatctgaaatcagtaaaaaagatatcacccgtctgggctttcgtagcagcctgctgcaagcgagctttaactacgaaaggatgcaggcgggcggttttacctgggcgatgttgccgatcctgaaaaagatttataaggacgacaaaccgggcttaagcgcggcgatgaaagataacctcgaatttattaatacccacccgaatctggtcggattcctgatggggttattaattagcatggaagaaaaaggagaaaaccgcgacaccattaaaggcctcaaagtggcactgtttggcccaatcgccgggattggcgatgcgattttctggtttactttgttgccgattatggcgggaatttgcagtagttttgccagccagggaaacctgctggggccgattctatttttcgccgtttacctgcttatctttttcctgcgcgtcggctggacccacgtcggttatagtgtcggcgtgaaggcgatcgataaagtgcgagagaacagccagatgattgcccgtagcgcaaccatcctcgggatcacggtaatcggcgggctgatcgctagctatgtgcatattaacgtggtgacaagctttgccatcgacaatacccacagcgttgcgctgcagcaggatttcttcgataaagtcttcccgaacattttaccgatggcctacaccctgctgatgtattacttcctgcgggtgaaaaaagcgcatccggtgctgttaatcggcgtgacttttgtgctctctattgtttgttccgcattcggcattttgtaaatggaacgaggcactgcgtctggtggtgcctctttacttaaggaatttcatcctgtgcaaacccttcagcaagttgaaaactatacggcgttaagtgaacgtgccagcgaatatttattggccgtgatccgtagcaaaccgaatgccgtgatttgcctggcgaccggagccacgccattactgacgtatcattatctggtagaaaaaatccaccagcagcaggttgatgtcagccagctcaccttcgtgaagctcgacgaatgggtggatctgccattaacgatgccaggcacctgcgaaactttcctgcaacagcatatcgtgcagccgctggggctacgtgaagaccagctcatcagctttcgctccgaagagataaatgagacagagtgcgaacgggtaacgaacctgattgcgcgcaaaggcggtctggatttatgcgttctcggattggggaaaaacggtcatcttgggctgaacgaaccgggagaaagcctgcaaccggcctgccatatcagtcaacttgatgccagaacacagcaacatgagatgttaaaaaccgcgggtcgccccgtgactcgtgggatcaccttaggcctgaaggatattctcaatgcccgcgaagttttgttactggtgactggcgaaggaaagcaggatgcgacagatcgttttctcacggctaaagtctctaccgctatcccggctagttttttatggctgcacagtaactttatttgtttaattaacacctaaccagatgaaaaatttgctcaaaatgtttaaattaacttatgtaacagtcacgcattatattaaataacatttgactgggttgaacataacgccgatagcaaaaggagttatgttcaacaatttaattttagatatacatataacttgttctattaataaatcacctcgtattctgactcgccccctggcgcagcaaagtcaggcatttatactcttttgaatacatagaaaattgatatcaatataatgaaaatatcaaatatttgcatataaatataatcttaaagttcagtctatttaatgttcaatgaaatatttctgcctgtataatctttaaagatgttgaacatatattcacattaaatatgattatgtacttgttacaaggataaggttatatatgaataaagttacaaaaacagctattgcgggcttacttgcgcttttcgcaggtaatgccgctgcaaccgatggtgaaatagtttttgatggcgagattttaaaatccgcttgtgaaatcaatgactctgataagaaaattgaagttgctcttggtcactataatgccgaacagtttcgtaatattggcgagcgtagcccaaaaattccattcactattcctttagttaactgcccaatgactgggtgggagcacgataacggcaacgttgaagcgtctttccgtctatggctggaaacgcgagataatggcaccgtccctaacttccctaatctggcaaaagtaggctcttttgctggcatagcggcaacaggtgtgggtatccgtattgacgatgcggaaagcggaaacattatgccactgaatgctatgggcaatgataacacggtttatcagatcccggcggaatccaatggtattgtcaatgttgacctcatcgcttactacgtaagtaccgtagttccaagtgaaatcaccccaggggaagcagacgctatcgttaacgtaacgctggattaccgttaatacgttagggcgttatctgacctgtcagataacgcccttttccttcctctttctcgttgtatcaggttgaaaaataactatgagtaaacgaacattcgcggtgatattaaccttgttgtgtagcttctgtattggccaggcgcttgcaggaggaatcgttttacagcgaacgcgagtgatctatgatgccagccgcaaagaggctgcgttacctgtcgcaaacaaaggcgcagaaacgccttatttactgcaaagttgggtagataatatagatggtaaaagccgtgccccatttattataaccccaccgctatttcgtcttgaggctggcgatgacagtagtctgcgaattattaaaacagctgataacctgcctgaaaataaagagagcctgttctacattaatgttcgtgccattccagcaaagaaaaaaagtgatgatgttaatgctaacgagttgacgctggtatttaaaacacggatcaaaatgttttatcgccccgcacacctgaagggacgggtaaacgatgcgtggaaaagtctggaatttaaacgtagtgaccatagtctcaatatatataacccaactgaatattacgtcgtatttgccggactggcagtcgataaaaccgatctcacaagcaaaattgaatatatcgcgcccggagaacataaacagttaccacttcctgcatctggcggaaagaacgtgaaatgggctgcgatcaatgattatggcggcagttccgggacagaaactcgtccactgcaataaaaaatataaaaacacaggtcatcagggaatgccacaacgacaccaccagggacataaacgcacaccgaaacagttggcgctcatcatcaaacgttgtttgccgatggtgctcactggcagcggcatgctttgcactaccgctaacgccgaagagtattatttcgaccccattatgctggaaaccacaaaaagtggtatgcaaacaaccgatctgagccgttttagtaaaaaatatgcacaactaccaggaacttatcaggttgatatctggctgaataaaaagaaggttagtcagaaaaaaattacatttaccgccaatgcagagcaacttctgcagccacagtttacggtagaacaactacgtgagctgggtattaaggtggatgaaatcccggcgctggctgaaaaagatgacgatagcgtgatcaacagccttgaacaaatcattcccggtacagctgctgaatttgatttcaatcatcagcaacttaatttgagcattccccaaattgcactgtaccgtgatgcaagaggttacgtctccccttctcgttgggacgatggtataccaacgctgtttaccaactacagctttacaggttctgataaccgttaccgccagggcaatcgtagccaacgacagtacctgaatatgcaaaatggtgctaattttggcccctggcgattacgcaactattccacatggacacgcaacgatcagacaagtagctggaataccatcagtagttatttacaacgtgatatcaaggcgttgaagtctcagttgcttctgggagaaagcgccaccagcggcagtattttttccagctacacctttactggcgtgcaactcgcttccgacgataatatgttgccaaacagccagcgcggatttgccccaacggtacgcggtatcgcaaacagtagtgcaatcgtgactatcaggcaaaatggttatgtgatctatcaaagcaacgtgagtgcgggtgcctttgaaattaacgatctctacccctcttccaacagcggcgatttagaagtcacgattgaagaaagtgacggtacacaacgtcgctttatccagccttattctagtttacccatgatgcagcgacctgggcatctaaagtatagcgcgaccgctggacgctatcgcgctgatgcaaacagtgatagcaaggaacccgaatttgctgaagccacggcaatatatggtttgaataatacttttacgctgtatggcggcctgctcggttctgaagattattatgcgctggggatcggtatcggcggcacacttggcgcactgggcgcgttgagcatggatatcaacagagctgacacccaattcgataaccagcactcttttcatggctatcaatggcgtacgcagtacatcaaagatatcccggaaaccaacaccaatatcgctgtcagctactatcgctataccaacgatggctattttagttttaatgaagccaatacccgcaattgggactataacagtcgccaaaaaagtgaaattcaattcaacatcagccagacaatatttgatggggtaagtctgtatgcctccggtagccagcaagactattggggcaataacgataaaaacaggaatatctctgttggggtttccggccagcaatggggagttggttacagcctgaattatcaatacagccgctacactgatcaaaataatgaccgcgcactctctttgaatctcagtattccgttagaacgctggttaccgcgtagccgggtttcctatcagatgaccagccagaaagatcgcccaacccaacatgaaatgcgtcttgatggcagtctgctggatgatggtcgcctgagctatagcctggaacaaagtctggatgacgataacaaccataacagtagcctgaacgccagttaccgtagtccttatggcaccttcagtgccggatacagctacggtaatgacagcagccaatacaattacggcgttaccggcggcgtggttatccatcctcatggcgtgacgctcagccaatatctgggcaacgcttttgcgcttatcgatgctaacggagcatctggcgtgaggatacaaaactatccggggattgctaccgatccttttggctatgcagtggttccttatctcacaacttatcaggaaaaccgtctcagcgtagatactacgcagctgcccgataacgtcgatcttgaacaaacaacacagtttgtggtgcccaacagaggtgcaatggtagcggcgcgtttcaacgccaatatcggttatcgcgtacttgttacagtcagcgatcgcaacggtaaaccgttgccctttggcgctcttgccagcaacgatgatacggggcaacaaagtatcgtcgatgagggcggcatactatatctctctgggataagcagtaaaagtcaaagctggactgtacgctggggaaatcaggcagatcaacaatgtcagtttgctttcagtacaccggatagtgaacctacaacctctgtattacaaggcacagcgcagtgccattaaggataaaaaaatgaaaagagcgcctcttataacaggtcttttgttgatatccacatcctgcgcttatgcctccagtggagggtgtggagccgacagcactagcggtgcgacaaattacagcagtgtggttgatgatgttacggtgaaccagacagataacgtgacaggacgggagtttacctctgcaacgctaagtagcactaactggcaatacgcctgttcctgctctgcgggtaaggcagttaaacttgtctatatggtcagccccgtacttaccaccactggacatcagacaggatattacaaactcaatgacagcctggatattaaaaccacattacaggcaaacgacattccaggactcacaaccgaccaggttgtctctgttaacacccgattcacacagataaaaaacaacacggtatattctgctgcaacccaaacgggtgtttgccagggtgatacgtctcgttatggacccgttaatattggtgcgaacaccacctttaccctgtatgtcaccaagccatttctcggcagcatgaccattccgaaaacggatattgccgtcattaaaggcgcgtgggtcgatggaatgggaagcccgtctacaggtgacttccatgatttagtcaagttaagcattcagggaaatctcaccgccccacagagctgcaaaattaatcagggcgatgttattaaggttaattttggattcatcaatggtcagaagtttaccacccgcaatgccatgccagacggttttactccagtagactttgatatcacttatgactgtggtgatactagtaagattaaaaacagcttgcaaatgcgcatcgacggtacaactggggtagtagaccagtacaacctggtcgccaggcgaagaagtagtgacaatgtgcccgatgtcggtattcgtattgaaaatctcggcggcggagttgcaaatattccttttcagaacggtatccttcccgttgatccttccgggcatggcaccgtcaatatgcgcgcctggccagttaatctggtcggtggtgagctggaaacaggaaaatttcagggcacagccaccattaccgtcatcgtgcggtaaaagaagacgttgcgttttgattaacgcaacgcttcggcactgttacccctgctgctccagcgcatacttatacagcgcatttttcttcacgccgtgaatttctgcggccagcgccgccgcttttttcagcggcagttctgcctgtagcagcgccagcgtgcgcagggcatcggcgggtaagtcttcttcctgtgctttatgaccttcgacaatcagcaccatttcgcctttgcgacggttttcatcttcctttacccacgccagcagctcgccaacgggcgcgccgtgaatggtttcccaggttttggtcagctcacgcgccagaaccacgtagcgggattcgcctaataccgcaacgatatcttccaggctatctaacagacggtgggtagattcataaaaaatcagcgtgcgcggctccgcttcaatggcttttagcgcatcacggcggcctttacttttggcaggtaaaaagccttcgtaacagaaacggtcagagggtaaacccgctgcgcttaacgcagtgatagcagcacacggcccgggtagcggcaccacgcggatccccgcttcacggcaggtacgcaccagatggtagccaggatcgttaattagcggcgttccggcatcggaaaccagcgcaatgttttgcccctcttgcagcttcgccagcagcgtttcagctttttgttgttcgttatggtcgtgcagcgcaaacaaccgggcattaatcccaaaatgttgcagcaataaaccggtgtgacgagtatcctcggcggcaatcagatcaacggcctgtaatacctctaacgcacgctgggtgatatccgccagattgccgattggcgtcggtacaatgtaaagctggccctgagaattatccgcgctttggtgttgtttcattgtgtcgtccgtattgccgatttaatattgagcattgcgtaaaaaaaatatcactggatacattatggtacccagtacattttctcgtttgaaagccgcgcgttgtctgcctgttgttctggcagccctgattttcgccggttgtggcacccatactcccgatcagtccactgcttatatgcagggcacggcgcaggctgattctgccttttatcttcagcagatgcagcaaagctctgatgataccaggatcaactggcaattactcgccattcgtgcactggtgaaagaaggtaaaaccgggcaggcggttgagttgtttaaccaactaccgcaagaactgaacgatgctcagcgtcgcgagaaaacactgctggcggtagagattaaactggcgcagaaagattttgctggcgcgcaaaacttgctggcgaaaatcacacctgccgatttagaacaaaaccagcaagcgcgttactggcaggcaaaaatcgatgccagccaggggcgtccttccattgatttactgcgcgcgttaattgctcaggaaccgctgcttggcgcgaaagaaaaacagcagaatattgatgccacctggcaggcgctctcctccatgactcaggaacaggcgaatacgctggtgatcaacgccgacgaaaatattctgcaaggctggctggatctgcagcgcgtctggtttgataaccgtaacgatcccgacatgatgaaagccgggatcgccgactggcagaaacgttatccgaacaatccgggcgcgaaaatgctgccaacgcagttggttaacgtaaaagcgtttaaaccagccagcaccaacaaaatcgccctgctgttgccactgaatggccaggcagcggtatttggtcgcactattcagcaaggctttgaagcggcgaaaaatatcggcactcagccagtggcagctcaggtagctgccgcacctgccgcagacgtagctgaacaacctcagccgcaaaccgtggatggcgttgccagcccggcacaagccagcgttagcgatctgaccggtgaacagcctgcagcccagccggtgcctgtaagcgccccggcgacaagcaccgcagcggtaagcgcacccgcaaatccatccgcagagctgaaaatctacgataccagtagtcaaccacttagccagatcttaagccaggttcagcaggatggcgcgagtattgtggtcggtccgttgctgaaaaataacgttgaagagttgctgaagagcaacactccgctgaacgtactggcactgaaccagccggagaatatcgaaaatcgcgtcaatatttgttacttcgcgcttagtccggaagacgaagcgcgcgatgcagcgcgtcatattcgtgaccagggtaaacaagcgccgctggtgctgatcccacgcagtagtttgggcgatcgcgtagccaatgcgtttgcgcaagagtggcagaaactgggcggcggcaccgttctgcaacaaaaatttggttccaccagcgaattacgcgcgggtgttaacggcggttctggtattgctttaacgggtagcccgattactctcagagcgacaaccgactccggcatgacgaccaacaatccaacgctgcaaaccacgccaaccgatgaccagttcaccaataatggcggtcgtgtcgatgcggtgtacattgtggcaacgccgggtgaaatcgcttttatcaaaccgatgatcgccatgcgtaacggtagccagagcggtgcaacgctgtacgccagctcccgcagtgcgcaagggaccgctggcccggatttccgactggagatggaaggcttgcagtacagcgaaatcccgatgctggcaggcggtaatctaccgttaatgcagcaggcactcagcgcggtgaataacgattatagtctggctcgcatgtatgcgatgggcgtcgatgcctggagcctggcaaatcatttcagtcaaatgcgccaggttcagggttttgaaatcaacggtaataccggaagcctgacggctaacccggattgcgtgattaacaggaacttaagttggctacagtaccaacaaggtcaggtagtccccgtcagttaaattaagtgattaacaggaacttatcatggctacagtaccaacaaggagtggtagtccccgtcagttaaccaccaaacagaccggcgatgcgtgggaagcacaagcgcgtcgctggctggaaggcaaaggactgcggtttatcgccgctaacgtgaacgagcgtggcggcgagatcgatctgataatgcgtgaaggccggaccaccatttttgtcgaggtacgctatcgccgctctgcgctttatggcggcgcggcagccagtgtgacccgcagcaaacaacacaaattattacagactgcccgcttgtggctcgcgcgtcataatgggagttttgatactgtggattgccggttcgatgtggtagccttcaccgggaatgaggttgagtggattaaggatgcctttaatgaccacagttaattaaggtttaaggattagcgtgcaagaaagaattaaagcttgcttcactgaaagcattcaaactcaaattgcggcggcagaggcgcttccggatgccatctcccgtgcagccatgacgctggttcagtctctgctcaatggcaacaaaatcctctgttgtggtaatggaacttccgctgccaatgcacagcattttgctgccagcatgatcaaccgtttcgaaacggagcggcccagcttacctgccattgcactaaatactgataatgttgtcttaacggcgattgccaacgatcgcttacatgatgaagtgtatgcaaaacaggtgcgggcgctgggtcatgcgggagatgtattgttagccatttccacccgtggcaacagccgcgatattgttaaagcagttgaagccgccgttacgcgtgatatgaccattgtggcattgaccggctatgacggcggcgaacttgcaggtttgttagggccacaggatgtggagatccgcattcctagccatcgtagtgctcgcattcaggaaatgcatatgctgacggtaaattgcctgtgcgatctgatcgataacacgcttttccctcaccaggatgattaaggagaatacatgaaggcattaagcccaatcgcagtccttatttccgcgctgctgttgcaaggttgtgttgccgctgccgtagtgggtaccgctgctgtgggtaccaaagccgcaactgacccacgcagtgtcggcacccaggtggacgatggtaccctggaagtgcgcgtgaacagcgcattgagcaaagacgaacagattaagaaagaagcgcgcattaatgtaacggcctatcagggcaaagtgctgctggttgggcagagtccaaatgctgaacttagcgctcgcgccaaacagattgctatgggcgtagacggtgccaacgaagtgtataacgagattcgtcagggccagccgattggtctgggcgaagcatctaacgatacgtggatcaccaccaaagtgcgtagccagctcttaaccagcgacctggtgaaaagctccaacgtgaaagtgaccaccgaaaacggtgaagtgttcctgatggggctggtgactgaacgtgaagcgaaagcggcggcagatattgccagccgggtgagcggcgtgaagcgggtaactacggcgtttacgtttattaaataacagccccttgtaatgcctgatgcgacgcttgccgcgtcttatcaggcctacaacgatacaaaccgtaggtcagataaggcgtttacgccgcatccgacatgttttccctcaaatcagaacaacagcgccagcccgccgacaatcacaccagacactgccaccatcgcccctgtcagccataaggctttcgccgggaacgctttgcgcagcataatcagactcggcaaactcactgccgggagcgtcatcaacaatgccagcgccggagcggttcccatacctgccagcatcatcgtttgtacaatcggaatttctgctgccgtgggaatgacaaacaagcatcctgctaccgccatcgccaccacccacatcaggctgttatcgacagcaccatcggcatgggggaataaccagacgcgagcggcacccaacaccagtactgcaaggatgtaaaccgggatcgtactccagaaaagcgtccatagcgccctgccccagcggctaaaaaacccgccctgtgcttccggtatgtcaatttcgaccggtgcctgcgtttgcggtgtttcacgcacccatttttgcaccagcgtcgcaatcagcaacaccatcaccagcccggccaccagacgaatcgccgcaaaaccccagccgaggacaaagcccataaacaccagcgtcgccgggtttaacaccggattgcccatccagaatgccagcgcaccgcccatgctcacctgttggcgacgcattcccgccgcgaccggagccgcacagcaggtacacatcatgcccggcaagctaaacagcgttcccagcagcgtgccgcgaaagcggctttgcccaagcgtacgcaacaaccagtcacgcgggatcagcacctgaatcaagctaccgaggatcacccccagcaccgccgctttccataccgcgaggaaatagatcatcgcgtaatccaacgccgcctgccatgggttagcatccgcctgcgcaaggatagatttaccgatactgtgggtttcggcagcagtaaacgctttgccgtagtaaggttcccatttcacataccagagaccggcaatgacaacgagaaagaaaagcgcgggtttccaccactgaatgggcgttgccgcctgagaactagactgaccagtcatagcattccccaggaataagttatgataattgagcgcgtgaatattacgctcactatcaattcttgggaataattattcagctcttttgcgtaattcactagagcttaaaatcgtcacgccttcatgctcaggccgcatgctctctgccagcatgacccgcgccacgtctctcgcatcaatggatttccagttacctggtaacaaacggaacagcggcgcaaaaagcgtttcgttcatccgctgtttgctacgatcgcccagtaacatgctcgggcgagcaatggtcaatttcggccagttctgggcgattaatgcttcttccatctcccctttgacgcggttatagaaaaacgggctgtgggcattggcacccatcgcactgactaccaacatatgctgcgcgcccagtcgccgcccggttaatgcggtatccactaccagcgtgtaatcggcatgaataaacgcctctttgctccccgcttctcgccgcgtggtgccgagacaacaaaacacaatgtcgatgggatcggtgacctgcgccaacgcgtcactcagttgcggatcatggggattaaacaccccgggcatatcgcccaacggacgtcgcgtcggcgcagcaatggcgttaactttcggttcgttaatcaacatccgcagcaggtgaccgcccaccagccccgttgcgcctgtaatcagtacctgactcatcttcgctcctttacagaattgtctgccttgcgctccacggctcatgcaccaggcttaatagaccatgaggtaattatccccgattgtgggaaattcgcctcatccaatgcaacaacgcggaggaagcatgagtaagaaaattgccgttttaatcactgatgaatttgaggatagtgaatttactagtcccgcagacgagttccgtaaagccggacacgaagtgattaccattgaaaaacaagcgggtaaaacggtgaaaggcaaaaaaggagaagccagcgtgaccatcgataaatccatcgatgaagtgacgcctgcggagtttgatgccctgctgctaccgggcggccatagtccggattatctgcgtggggacaaccgttttgtcacctttacccgtgattttgtgaatagtggcaaaccggtgtttgccatctgtcacggcccgcagttgctgatcagcgccgatgtgattcgggggcgcaaactgaccgcagttaaaccgatcattattgatgttaaaaatgcgggcgcggaattttacgatcaggaagtcgtggttgataaagatcagctggttaccagccggacaccggacgatctgccagcgtttaaccgcgaggcgttacgcctgctcggtgcctgattacgcctgctcggtgccactgtcgcgtagccaaatcatttttttaccaaagcccagcgtgttgtcggtgaatttgatttcatcgagccggatttcccacaccggggcgctcagcattctggcaaccggaaagcgacgattgtacgccttgcgcgcgaggtcgctttcctcaccttccagcctgcggatctcacctttaaactgcacaccgcgaattaacgctaccgttttcggctgaccgtttaccgttccggcaaccgcagcctgcggcccactcatctgcgcgtggcgcgttttttcttccgtcaaaatgtagaaggcgactttctgcgcatcaaaaagataaaaggcattagcgcaccagagttccccttcctgctgcacacaccaagtgacaacatgttgttttgccagccaacggctgatggcgatgagtgtttccattgctgttctcttttatactgtgggcctgaccttaacatgcgacgcagacgatgacaccctggtttctttacttgatccgtaccgccgacaataagctttataccgggatcaccacggatgtcgaacgccgctatcagcagcaccaaagcggcaaaggggcgaaagcactgcgcgggaaaggagaactaacgctggtgttttccgcgccagtgggcgatcgtagcctggcgttacgggcggaatatcgcgttaagcaactgaccaaacggcaaaaagagcgtctggtagcggaaggcgcagggtttgcagagctgttaagcagtctgcaaaccccggagattaaaagcgattgaaatgctcgtgatactcaaccaggccggtaacgccattcagcgcgtcatccgctaaacgatgtacctggaaggcgctttcagtgcccggccagcggcaacgcagatcgtgatgcgccgccagttcaaagccgaaacgactgtacagcgccggatcgcccagcgtcaccactgcggcatagccgaactcattaaggctatcgagtccttcatagaccagttggcgtgccagcccctgtccacggtatttttcatcaaccgccaacggtgccatgccgacccattgcaggtcttcgccctgcacatcaaccggactaaatgccacatagccaatgacctgaccttcgtcatctgtcgccaccagccccagcgtcagaaagccatcttcacgcagatcgtgaaccagcttcgcttccgcatcactttcgaaactgcgacgcagcagggcatcaatacccggcgcatcaatgggaatttctactcgaattagcatggttcacctacgcttgtctgtttggtttcaggcgcggttttcattcccgcctcaacaaaatccgccagttgcagcagcatcatgcgtaaggctttcggcatttgctccagttcaatggcgtccatcaggtttttcacatacagccccagctccgtatcgccttcaatcaccagccgacgctggaagaagagcgtatccggatcttgtttacgcgccgcaatcatcagcagatcgctggcgtcggcactaaaactcacatcagcttgcgcgttctggctaacgaccagtttgccattcaccacgctggtaaaccattgcaggtcaatatcacgcacatgaatacttaaccagcggccttcaagaaactccagctcgccatcatccagcgcctggcggaattgccagcttaagacctgctcaagaacctggcgttttagcgcaaatggcgtcagttttaccggtacactcaacagagatggccccaaatgcacaatacgggaacgcagtttatccaacacgagttttactccctgtttcaacaatcatcctattttgccatatcagaaaaataacatagcggtataaatcaacaattccatatgaaattgctgctaccaccaatacaactttaactgccttaaatcaaaaattgtcgcagcaaggttaactaaaatcccagttcgttaacatttttgcgttttgatagcgcaaccttcaggaaaaattatggagctgctctgccctgccggaaatctcccggcgcttaaggcggccatcgaaaacggcgcagatgctgtttatatcgggctaaaagatgataccaatgcccgtcacttcgccggccttaactttaccgagaaaaaattgcaggaagcggtgagttttgtccatcaacatcgccgcaaacttcacatcgcgattaacacttttgcgcatccggacggttacgcccgttggcagcgcgccgtggatatggcggcgcagctgggtgccgacgcgctgatcctcgccgacctcgccatgctggagtacgccgccgagcgttatccgcatattgagcgccacgtaagcgtgcaggctagcgcgaccaatgaagaggcgattaacttttatcatcgccattttgacgttgctcgcgtggtgctgccgcgcgtgttgagcattcatcaggtgaaacaactggcacgggtcacacctgtaccactggaagtctttgctttcggcagcctgtgcattatgagcgaaggtcgttgctatctgagcagctatctgacgggtgagagccccaacaccataggcgcgtgttctccggcccgtttcgtgcgctggcaacaaacgccgcaggggctggaatcccgcctgaacgaagtgctgatcgaccgttatcaggacggcgaaaacgcaggttatccgacgctatgtaaagggcgttatctggtggacggcgagcgctatcacgcgctggaagaaccaaccagtctcaataccctggaactgctgccggagttaatggcggcgaatattgctagcgtgaaaattgaaggccgccagcgtagcccggcgtatgtcagccaggtggcgaaagtctggcgtcaggctatcgaccgttgtaaggccgatccgcaaaactttgtaccgcaaagcgcgtggatggagacgctcgggagcatgtccgaaggcacgcaaaccactcttggcgcatatcaccgtaaatggcagtgagaaaagcaatgaaatattccttagggccagtgctgtggtactggccaaaagagacgctggaagaattttatcagcaggccgccaccagcagcgccgacgtgatttatcttggtgaagcggtatgcagcaagcgtcgggcaaccaaagttggcgactggctggagatggcaaaaagcctcgccgggagtggtaagcagattgtgctctccacgctggcgctggtgcaggcaagttctgaactgggcgaactgaaacgctatgttgagaacggtgagtttctgattgaagccagcgatctcggcgtggtgaatatgtgcgctgaacgcaaactgccgttcgtcgccgggcacgcgctgaactgctacaacgcggtgacactgaaaatattgctcaaacagggcatgatgcgctggtgtatgccagtggagctttcccgcgactggctggtgaatctgcttaatcagtgcgatgagctgggcattcgtaaccagtttgaagtggaagtcctgagctacggtcatctgccgctggcctactccgcccgctgctttaccgcgcgtagcgaagaccgcccgaaagatgagtgtgaaacctgctgcattaagtatccgaacgggcgcaacgtgctgagccaggaaaaccaacaagtgtttgtactcaatggcattcagaccatgagcggctacgtttacaacctcggtaacgagctggcatccatgcagggcctggttgatgtggtccgcctgagtccgcagggtactgacactttcgcgatgctcgacgccttccgcgctaatgaaaatggcgctgcaccactgccgttgacggcgaacagcgactgtaacggctactggcggcggctggcaggactggagctgcaagcctaagtaaatagctcactttgttaacaactttaactactctttaatgcagtattaaagattaatcggtaacaaagtgagctgttatgactgataaaaccattgcgtttagcctactcgatctggcccccattcccgaaggttctagtgcgcgagaagcattctcccactctctcgatctcgcccgtctggctgaaaagcgcggctatcatcgctactggctggcagaacaccacaatatgactggcattgccagtgctgccacgagcgtattgatcggctatctggcggcgaataccaccacgctgcatctggggtctggcggcgtgatgttgcctaaccacagtccgttggtcattgcagaacagttcggcacgcttaatacactctatccggggcgaatcgatttggggctgggtcgtgctccgggtagtgaccaacggacaatgatggcgctacgtcgtcatatgagcggcgatattgataatttcccccgcgatgtggcggagctggtggactggtttgacgcccgcgatcccaatccgcatgtgcgcccggtaccaggctatggcgagaaaatccccgtgtggttgttaggctccagcctttacagcgcgcaactggcggcgcagcttggtctgccgtttgcgtttgccagtcacttcgcgccggatatgctgttccaggcgctgcatctttatcgcagcaacttcaaaccgagtgcacggctggaaaaaccatacgcgatggtgtgcatcaatattatcgccgccgacagcaaccgcgacgctgaatttctgtttaccagtatgcagcaagcctttgtgaagctgcgccgtggcgaaaccgggcaactgccgccgccgattcaaaatatggatcagttctggagtccgtctgagcagtatggcgtgcagcaggcgctgagtatgagcttggtaggtgataaagcgaaagtgcgtcatggcttgcagagcatcctgcgcgaaaccgacgccgatgagattatggtcaacgggcagattttcgaccaccaggcgcggctgcatagctttgagctggcgatggatgttaaggaagagttgttgggataatgtgtcttaacgcgggaagccttatccgagctggcaacgctgtcctacatagacctgataagcgaagcgcatcaggcattgtgtaggcagcagaaatgtcggataaggcaccgctgattactgatacaccggcagtaaattaaagctgcttaaaatatgcaccagtgcgttgccgacgccaaacaccagaatcagcgcaatcatcggcttgccaccccagacgcggaatttcgggctgccaaagcgtttacggcttgcacgggctaacagcgccggaacaattgccgcccagatggtagccgctaaaccagcataaccaatggcgtacaggaatccgttcgggaacaacagcccccccacaactggcggggcaaaggtcagcaatgccgttttcaagcggcccacagcgctgtcgtcgaaaccaaacagatctgccagatagtcaaacaaacccagcgttacgccgaggaagctactcgctaccgcaaagttactgaacacgaccagcagcagatccagactacggctgttcagtacgccgcttaacgcctgtaccagcacatcaatattaccgcccttctctgcaataccgataaactccggacgcgggatgttacccatcgtcgccagcaaccagatggtatacagcgccagcgccatcagcgtaccgtacaccagacatttcacgatggttttcggatctttgccgtaatacttcatcaggcttggcacgttaccgtgataaccaaagcttgccagacagaacggcagggtcatcaacagatacggtgcataagacgcattgctttcggcgacgttgaacaatgtcgcaggctgcacatgccccagcaggctaccaaaggtgaggaagaaggtaatgactttcgcccccagcacaatcgctgtcatgcgactgacggctttagtgctcaaccacaccacaaacgctaccagcaatgcaaaaccaaaacccgccgcccgtgccgggacgtttagactcatctctgcgaaggtgtgatgcagaatgctaccactggcagaaatataggcataggtcaggatatagagcacaaaggcaatggaaatgccgttgaccacgttccagcctttgcccagcaaatctttggtgatggtgtcaaaactgctaccgattctgtaattcaggttagcttccagaatcatcaagccggaatgcagcatacagaaccaggtaaagatcagcgccgccatactccagaaaaaccacgccccggacatgaccactggcagagaaaacatccctgcgccaataatggtgccgccgataatcaccacgccgccaagcaggctcggactcgtttgggtggtggttagtgttgccatgagggcttctctccagtgaaaaatagtgcgactgcgttgttatgcattgcactgtaccagtacacgagtacaaaagacagaaaaaaagccccgatggtaaaaatcggggctgtatatattattttacagattgtgttcgctgttcagcgatgattacgcatcaccaccgaaacgacgacgaccggtagaatcatcacgacgcggagcgcggccttcacgacgttcgccgctaaaacgacgaccatcaccacggccaccttcacggcgttcaccgctgaagttacgaccgccttcacgacgttcgccaccgaaaccacgaccaccgccacgacgctcaccgccagtatgcggctgtgcatcgcccagtaactgcatgttcatcggcttgttgagaatgcgagtgcgcgtaaagtgttgcagcacttcacccggcatacctttcggcagttcgatggtggagtgagaagcaaacagcttgatgttaccaatgtaacggctgctgatgtcgccttcgttagcaatcgcaccaacgatatgacgaacttcaacaccatcatcgcggcccacttcaatgcggtacagctgcatatcgccaacatcacgacgttcacgacgcggacgatcttcacggtcaccacgcgggccacggtcgttacgatcgcgcggaccacggtcatcacggtcacggaattcacgtttcggacgcatcggcgcatctggcggtacgatcagagtacgttcaccctgtgccattttcagcagtgccgcagccagagtttcgagatccagctcttcaccttcagcagtcggctgaattttgctcagcagtgcgcggtattgatccagatcgctgctttccagctgctgctgtactttagcggcgaatttttccagacggcgtttgcctagcagttctgcgttcggcagttctacttccggaatagtcagcttcatagtacgttcaatgttgcgcagcagacgacgctcgcggttctcaacgaacagcagcgcgcggccagcacgacccgcacgaccggtacgaccgatacggtgaacgtaagactcagaatccatcgggatatcgtagttaactaccaggctgatacgctcaacgtccaggccacgggctgcaacgtcggtcgcaatcaggatgtccagacgaccatctttcaggcgttccagtgtctgttcacgcagcgcctggttcatgtcaccgttcagcgcggcgctgttgtagccgttacgctcaagagcttcagccacttccagagtcgcgtttttggtacgaacgaagataatcgccgcatcaaaatcttccgcttccaggaaacgtaccagtgcttcgtttttgcgcataccccagacagtccagtagctctggctgatgtcaggacgggtagtcacgctggactgaatgcgcacttcctgcggctctttcataaagcggcgggtaatgcgacgaatcgcttccggcatggttgcagagaacagagcggtctgatgaccttccgggatctgcgccataatggtttcaacgtcttcgatgaagcccatgcgcagcatttcgtcagcttcatccagaaccagaccgctcagtttagagaggtccagagtgccacgtttcaggtggtccagcagacggcccggagtaccgacaacgatctgcggcccctgacgcagggcgcgtaattgcacgtcataacgctggccgccgtacagagcaaccacatttacgccgcgcatgtgtttagagaaatccgtcattgcttcagcaacctgtaccgccagttcgcgggtcggtgccagcaccagaatctgtggtgctttcagctcaggatcaagattctgcaacagaggtaaagagaatgctgcagtttttccgctccccgtctgggccatacccagaacgtcgcggccattcagcagatgtggaatacactctgcctgaattggagatggtttttcgtaacccagatcgttaagggcttcaaggataggagccttcaggcccagatctgcaaaagtggtttcgaattcagccatgtagtacgtgtgcctcaaaattaatggcggccagtctacataactcatcatgaaattgatcagcaattttcattgaaaagtgtgaaccggctcaaagtaggtgtattaacgaacaacaacgccctcacccgttaaggtgatggcaatcaaaaaagattacgggctgatgtgtacgtcagttattgctggtcgctttctgccaggtcatcttggtcctggcccaggaggcttaattccaacaatgcgtatcggtgctcaacaaagttatgaacgttgttggcaaccgccagtttgaacagtgccgtggcgctgtccaaatcccccagacttaggtagtacttacctaaatagaagttggtttcactgagatgctcagcgaggctggtgttatccgttgcgtccgccttgagcctttccattaacgtttgttcgctaatgttgcccaggtagaactcgacaatgttccatccccactgttccttatcgcttttttcgaagtgctgtttcaacacttctttagcctgcttctcatcgagcttctgctcggcgagataaagccacagactacggaaaggatcattgggatcgtcttgataaaacgccagcagatcatcttgcgctaacttgtcacgaccgccgtaatataatgcgatcccgcgattcaagtgcgcgtagttgtaagttggatcaagctcaagtacagaatcaaacgcttcataggcagcatcaaaattgcctgcctgcgttaaatatatgcctaagtaattgaatacttcaggcatatccggtcggattgccagcgcttggctaaaatcgttacgcgctaatgccctcagaccgagactatcatacaacactccgcgctcatataaaagctgtgcgcgttcgtcatcggttaaagcccgactggcaaggatttgttccatacgtgccagaatcacttcctgctgtaaagtcggttgcaatggtaccgcgaggacttcacttttacgccaggaagtattactgcatcctgcaagcgtaagtgctgtcgcaacgaaacaccagcgcaaaaaaggcttcatttcccactcccgaagaccacggttgaatgaacgtcctgttcccggttgctaacaaggcgtcctgcccggttaaaagccccccgccgcagcggagggcaaatggcaaccttactcgccctgttcagcagccggagcttccggtgctgcagcaggttgagactgctcagtcgcttctttaatgctcagacggatacggccctggcgatcaacttccagaactttcaccggtacttcctgacccatctgcaggtaatcggtcactttctcaacgcgtttgtcagcgatttgagagatgtggaccagaccttctttaccgccgccgatggcaacaaatgcgccaaagtcaacgatacgggtcactttaccagtgtagacgcggcccacttcgatttctgcagtgatctcttcgatacgacgaatagcatgtttcgctttctcgccgtcggtcgctgcaatcttcacagtaccgtcatcttcgatttcgatggtggtgccagtttcttcggtcagagcacggattacagaaccgcctttaccgataacatctttgatcttgtccgggttgatcttgatggtatggatacgcggtgcgaactcagagatatcgccacgcggcgcgttgatcgcctgttccattacgcccaggatatgcagacgcgcacctttagcctggttcagcgcaacctgcatgatctctttggtgataccttcaattttgatatccatctgcagtgcagagataccgtcgcgggaacctgcaactttgaagtccatatcgcccaggtgatcttcgtcgcccaaaatgtcagacagtacaacgtagttgtcgccttctttcaccagacccattgcgatacccgcaacggcagctttgatcggcacacctgcgtccatcagcgccagagacgcgccgcacacggaagccatagaagaggaaccgttggattcagtgatttcagacacaacacgtacggtgtacgggaatttgtccatatccggcatgactgccagcacgccgcgcttcgccagacgaccgtgaccaatttcacgacgcttcggagaaccgaccatgccggtttcgcctacggagtacggagggaagttgtagtggaacaggaaggtatcggtacgttcgcccatcagttcatcaagaacctgcgcgtcacgagcagtacccagcgttgcggtaaccagcgcctgcgtttcaccacgggtgaacagcgcagaaccgtgagtacgcggcagcacgccagtacgcacatccagaccacggatcatatctttttcacgaccgtcgatacgcggttcgcctgccagtacgcggctacgaacaacgtttttctcgatcgcgtgcagaatttcacccagttcgttttcgtccagggtttcgtcttcagcaagcagcgtcgcgatggtttcagatttgatgacatcaacctgcgcataacgctcttgtttgtcggtgatgcggtaagcatcgctcaggcgagcttcagccagtgcagcaacgcgcgcgtttagcgcttcgtttaccggctccggctgccagtcccaacgcggtttaccggcttctttcaccagttcattgatgttctgaataacaacctgctgttgttcatgaccgaacactactgcgcccagcatctggtcttcgctcagcagttgagcttcagattcaaccatcagtacagcggcttcagtaccggcaacaaccagatccagtttgctctctttcagctcgtcctgagtcgggttcagtacgtactggtcattgatgtaacctacgcgggcagcaccaatcgggccattgaacggaataccagacagagacagcgctgcggaagcaccaatcatcgcgacgatatccgggttaacttgcgggttaacagaaaccacggtggcgataacctgaacttcgttgacgaagccttccgggaacagcgggcgaatcgggcggtcaatcagacgcgcgatcagggtttcgccttcgcttgggcggccttcacgacggaagaagctacccgggatacgaccagcagcgtaggtacgctcctgatagttaacggtcagtgggaagaagtcctgacctggtttggcttttttctggccaacaacggtaacgaataccgcggtgtcatccatgctaaccataacagcggcagtagcctgacgagccatcatgccggtttccagagtcacggtgtgttggccgtactggaatttacgaacgatcggattaagcaatgtaatatcctttctctttcttagacagtaccttacggcactggtgttaataccgcttcttctgcgcatcctcgcgactaatgacaaccctaacccagctctatgtgggtaaagcctctcattagccgcgcgaacctctgcaacggaagatcattcatagcaacaatacattagtttccagtgaattgctgccgtcagcttgaaaaaaggggccactcaggcccccttttctgaaactcgcaagaattagcgacgcagacccaggcgctcgatgagctgggtgtaacgtgctacgtctttacgtttcaggtagtcgagcagtttacgacgctgagaaaccatgcgcagcagaccacgacggctgtggtgatcttttttgtgctctgcaaagtggccctgcaggtggttgatctgtgcagtcagcagtgctacctgaacttcggtagaaccggtgtcgtttgcgtcacgaccaaactcagaaacgattttagctgttgcttcagtacttagagacattttaaaactccaaagtatatagaatgaaaggacgccgatctctaattcagcgatcccagtgtacgttacgcaaagtgttaaacaatttacgcgacgttaagcggcagtattctactcgtagcgacctgttatcgcaagacggttaacattacgccgggtattcaaccaccaggcgacgaggcgcaacgcggccttcatcgtcaatttcgcccataccgataaatttgccgttctcaccttccgtgacgcgaaccagtccttccagtggcgcaccagatgtacgaaccgggttaccatttttgaagtaaacagaagacgttaacggaagattcaccaccggatagtcgctagctggactgtccattggcatcagtaatggatcaagtaactccgcggctggaatatcctgctgttcagcttgctcaacaagttcacgcaggtgctccagggtcaccatccgttcaaccggatatttacttaccgccagacggcgcaggtaaataacatgcgcgccacagccgagtttttcacccaggtcatcaatgatggtgcggatataagtgcctttactgcagtgaatttccagctccagctcattgccttcatggcgaataaacagcaattcataaacggtaatcggacgcgcttcacgcggaacttcaatgccctgacgcgcatattcgtacagttttttgccctgatatttcagtgcactatacatgctagggatctgttcgatatcgccacggaaagtatccagtgccgctgccagctgctctgcgctaaaggttaccggacgttcttcaacgatctgtccgtcggcatcagaagtatcggtacgctgtccaagacgcgcaatgacccgatagcgtttgtcggagtccagcagatactgggaaaacttcgtcgcttccccgaggcaaatcggcaacatgccggtcgccagcgggtccagcgcaccggtatgcccggcacggttggcgttatatatacgtttcactttttgcagcgcatcgttgctggacataccctgaggtttatccagcaacaaaacgccgttaatgtcgcgaccgcgacgacgaggacgactcattagtcctccttgctgtcgtccgggttaacacgacgttcttcgtcatgtttgaccacgctggtcaccaggttactcatgcgcatcccttcaaccagagagttgtcgtagaagaaggtcagttccggcacgatacgcaggcgcatcgctttccccagcaggctgcggatgaaaccagaagcttcttgcaacgctttgatgcccgctttaaccgcgtcttcatctttgtcgttgaggaacgtcacatatactttggcatacgccaggtcgcgagacatttcgacaccggaaacggtggtcatcatgcccaggcgaggatctttaatttcacgctgcaggatgagagcgatctctttttgcatttcctgcgctacgcgctgcgggcgaccaaattctttcgccataataaattctcctgacaaaaaaggggctgttagcccctttttaaaattaatttcaggtggaagggctgttcacgttgacctgataagacgcgccagcgtcacatcaggcaatccatgccggatgcagcgtaaacgccttatcccgcatggaaccctaaaaaccttaagcaatggtacgttggatctcgatgatttcgaatacttcgatcacatcgccagtgcggacgtcgttgtagttcttaacgccgataccacattccataccgttacggacttcgttaacgtcatctttgaagcggcgcagggactccagctcgccttcgtagataaccacgttgtcacgcagaacgcggatcgggttgtgacgtttaaccacaccttcggtaaccatacagcctgcgatggcaccaaatttcgggcttttgaacacgtcacgaacttccgccagaccgataatctgctgtttcagttccggagacagcataccgctcatcgccgctttcacttcgtcaatcaggttatagatgacggagtagtaacgcagatccaggctttccgcttcaatcactttacgtgcagaggcatcagcacgtacgttaaagccaaccaggatggcgttggacgccgcagccagggtggcgtcggtttcggtgataccacctacgccagaaccgatgatcttcactttaacttcgtcagtagacagtttcagcaaggagtcggagatcgcttcgacagaaccctgtacgtctgccttcaggacgatattcacttcgtgaacttcgccttcggtcatgttggcgaacatgttctcgagtttagatttctgctgacgcgccagtttaacttcgcggaatttaccctgacgatagagtgcaacttcacgcgctttcttctcgtcacgtacaacggtaacttcatcacccgcagccggtacgccggacaggccgaggatttccaccggaatggacggacccgcttccagcacttcctgacccagttcgttacgcatcgcacgaacacgaccgtattcgaagccacacagaacgatatcgcccttgtgcagagtaccttcacgtaccagaacggtagcaaccggaccacgacctttatcgaggaaggattcgataaccgcaccgctcgccatacctttacgtaccgctttcagctccagaacttccgcctgcagcaggatagcgtccagcagttcatcgataccggtacccgctttcgcagatacgtgtacgaactggctttcaccgccccactcttccggcaggatgccgtactgggagagttcgttcttaacgcgatccggatcagcttctggtttatcgatcttgttcactgcaaccaccaccggtacctgcgccgctttcgcgtgctggattgcttcgatggtctgcggcatcacaccgtcgtcggcagcaacaaccaggactacgatgtccgttgcctgcgcaccacgagcacgcatactagtaaacgcggcgtgccccggggtgtccaggaaggtgatcatgccgttttcagtttcaacgtggtatgcaccaatgtgctgggtaatgccgcccgcttcgccagaggccactttcgtactacgaatgtagtccagcagagaggttttaccgtggtcaacgtgacccatgatggtcacaaccggcgcgcgcggttcagccgcagcacccgtgtcacggtcgctcattaccgcctcttccagctcgttttcacgacgcaggataactttatggcccatctcttcagcaaccagctgtgcggtttcctgatcgataacctggttgatggttgccattgcgcccagtttcatcatcgctttgatgacctgagagcctttaaccgccatcttgttcgccagttcgccaacggtgatagtttcgccgatcacaacgtcacggttaacggcctgagcaggcttctggaagccttgctgcaggctagaacctttacgttttccgcctttaccgccacgtactgctgcgcgtgcttcttcacgatcagctttactttcagcgtgtttgttgcctttcttcggacgcgctgctttcgcgttacgaccacggccacggccgccttcgacttcacgatcgctttcgtcttctgcctggcgagcatgttgagaagtagtgacgtgataatcgctggaatcttcagtcggttccgcgttatcagtccatttgttttcttccgccatacgacgtgcttcttcagcaacgcgacgtgcttcttcttcgagtttacgacgcgcttcttcttcagctttacgcttgagctctgcagcttcctgctcacggcgggctttttcagcctgggcgtttttagtcatatcgtcttgttgattgctcactttgtctttttccgcagcttcacgtttcgcttgttcagcagcttcacgcttagcttgttctgcggcctcacgttcagctttttgttgcgcctcgcgtttagcgctttcttctgcctcacgacgggcttgctcttccgcttcacgctgcgcttgctcttccgctgcaaggcgttcagcctcttgcggatcgcgtttcacaaaggtgcgtttcttgcggacttcgatttgtacgcttttgctttttccaccggtaccaggaatgttaagggtgctgcgtgttttacgttgcagcgtcaatttgtccgggccactatttttctgattcaggtggtcaatcaaagtctgtttctcttgtgcagacacagagtcgtcagcagacttccggatacctgcatcagcaaattgctgtaccaggcgttccacggaggtctgtcgctctgcggccagcgttttaatcgttacatctgtcatgctgttccttcctgctacagtttattacgcttcgtcaccgaaccagcaaatattacgggcagccataatcagtgctccggctttttcgtcggtcaacccttcgatatcagccagatcatcaatgccctgttcggcgagatcttccagcgtacaaacgccacgggcggccagtttgaatgccaaatcacgatctaccccttcaaggttcagcagatcgtcagccggtttgttatcaccgaggctttcttcctgggcctgtgcaatggtggccagtgcatttttagcacgctcgcgcagtgcttcaacggtcggctcatcaaggccttcgatttccaacagctctttcatcggcacataggccaattcttccagcgtgctgaagccttcttctaccagaacagtcgcgaagtcttcgtcgatgtcgagatatttggtgaaggtgtcgatcgctgcgtgcgcttccgcctgatgcttagcctgcaggtcgtcaacggtcatcacgttgagttcccaaccgctcagctggctagccagacgcacgttctgaccgttacggccaatcgcctgcgccaggttaccggcttcaacggcgatatccatggtgtgtttatcttcatccaccacgatagaagcaacgtctgccggtgccattgcgttaatcacgaactgcgccgggttatcatcccacaggacgatatcgatacgctcgccacccagttcagtagacaccgcctgaacacgcgcgccacgcatacctacgcaagcacctaccggatcgatacgtttatcgttggttttcaccgcgattttcgcacgagaacccggatcgcgagccgctgctttaatttcaatcacttcttcgccgatttctggcacttcaatacggaacagttcgatcagcatttccggcttggaacgagtgacgaacagttgcgcgccacgcgcttccgggcgaacggaatagagcacgccacgaacgcggtcgccagggcggaagttttcacgcggcagcatatcttcgcgcaggatcacggcttcagcgttgttgcccagatccagagagatgttgtcgcggtttacttttttcaccacgccggtgatgatttcaccttcgtgttcacggaactgatcaaccaccatcgcacgttcggcttcacgcactttctgcacgataacctgttttgccgtctgggtagtgatacggtcaaaggtaacagactcaatctgatcttcaacgtaatcgcccaggttcaggctttcatcttcataacgtgcggcttcaagggtgatttccttggtcggctgggtgacttcatcaacaactaaccagcgacggaaagtgtcaaaatcaccgcttttgcgatcgatctgtacgcggacgtcgatctcttgttcatattttttctttgttgctgtcgccagcgcgctttccaatgcttcgaaaatcttctcgcgaggtagcgccttttcattggatacggcttcaactacagccaaaatttctttgttcatcgcgggcttttcacctcatccagactattaaaagtggggaaccaggttcgccttctggatattactcagcgcgaacacttcatctttaccttcgacggtaactgtgatcatttcaccgtctaccgctttgataacgccctgccatttacgacggttttgtaccgccatacggagaaccagagtcacctcttctccgacaaaacgggcgtagtgttcagccgtgaacagtgggcgatcgagacccggactggagacttccaggttataagcaacggtgatgggatcttcaacatccagcacagcacttacctggtggctcacatcagcacaatcatcaacattgatgccatcttcactatcaatatagatgcgcagtgtggatgtgcgaccgcgaataaattcgatgccaaccagttcaaaacccagggcctcaactggcgcagtaatcatctctgttaatttttgctctaatgtggacaagcccacccccaagacataaaaaaagggcctaaagcccagttattctgtagtcagataacaaaaaaccccgataaatcggggctttatataactgaaccctataaccgcaactgcggtctggagcactttccagaaggattttttcaaatcccactacgaaggccgaagtcttcacagtatatttgaaaaaggactctaagggaaagtggttgcgggggccggatttgaaccgacgatcttcgggttatgagcccgacgagctaccaggctgctccaccccgcgcctgaaacgtggcaaattctactcgttttgggtaaaaaatgcaaatactgctgggatttggtgtaccgagacgggacgtaaaatctgcaggcattatagtgatccacgccacattttgtcaacgtttattgctaatcatgtgaatgaatatccagttcactttcatttgttgaatacttttgccttctcctgctctcccttaagcgcattattttacaaaaaacacactaaactcttcctgtctccgataaaagatgattaaatgaaaactcatttattttgcataaaaattcagtgagagcggaaatccaggctcatcatcagttaattaagcagggtgttattttatgacgacgattctcaagcatctcccggtaggtcaacgtattggtatcgctttttctggcggtctggacaccagtgccgcactgctgtggatgcgacaaaagggagcggttccttatgcatatactgcaaacctgggccagccagacgaagaggattatgatgcgatccctcgtcgtgccatggaatacggcgcggagaacgcacgtctgatcgactgccgcaaacaactggtggccgaaggtattgccgctattcagtgtggcgcatttcataacaccaccggcggcctgacctatttcaacacgacgccgctgggccgcgccgtgactggtaccatgctggttgctgcgatgaaagaagatggcgtgaatatctggggtgacggtagcacctacaaaggaaacgatatcgaacgtttctatcgttatggtctgctgaccaatgctgaactgcagatttacaaaccgtggcttgatactgactttattgatgaactgggcggccgtcatgagatgtctgaatttatgattgcctgcggtttcgactacaaaatgtctgtcgaaaaagcctactccacagactccaacatgcttggtgcaacgcatgaagcgaaggatctggaatacctcaactccagcgtcaaaatcgtcaacccgattatgggcgtgaaattctgggatgagagcgtgaagatcccggcagaagaagtcacagtacgctttgaacaaggtcatccggtggcgctgaacggtaaaacctttagcgacgacgtagaaatgatgctggaagctaaccgcatcggcggtcgtcacggcctgggcatgagcgaccagattgaaaaccgtatcatcgaagcgaaaagccgtggtatttacgaagctccggggatggcactgctgcacattgcgtatgaacgcctgttgaccggtattcacaacgaagacaccattgagcagtatcacgcgcatggtcgtcagttgggccgtctgctgtaccaggggcgttggtttgactcccaggcgctgatgctgcgtgactctctgcaacgctgggttgccagccagatcactggtgaagttaccctggagctgcgccgtgggaacgattatagtatcctgaataccgtcagtgagaacctgacctacaagccagagcgtctgacgatggaaaaaggcgacagcgtgttcagcccagatgatcgtattggtcaattgaccatgcgtaacctggatatcactgatacccgcgagaaacttttcggttatgccaaaactggcctgctttcctcctctgccgctagtggcgtgccgcaggtggagaatctggaaaacaaaggccagtaattcgacatcaaccctgcccttcaggggtggggttaccttgcttatcctctgtaaactcctttctgagcatcacataatcgaaaacatcatggtttgcatccacaacccgactgtctcctttatagtgtgcaatcacttcctcaagcgtttgcggctgttccggctttgttacccccatccacgcattaataaggtaattattgtaagctgtgctaaagatgttgttttccgttgtgcgatccacgccatccccaagaacggggctataccagataaacatcgggacatgatatgcctgctggctagcctccctgcctccatgaaaatagacgttcttcttcgtagggtcacgttccaggccgtggtcggcaaaatacatgacgctggcgcggcgatcttttaataattcaaaaacctgacctagcaaactatctgtgtaatgaatggagttgtcatagcaggcatcctgatcgtcctgcggttgaaacacggcgctggattgcggataggcgctacaagccggttcatggcttccatttaaatgaagaacaatcagtttcttttgctgcgtattttgctgtaatgcttggcttaaatgcggcaacaacaattcatcaaatcctctgacataaactgtttccatggcgcgcatggcgatactggtaactgctgtaccattctgccgaaaagcggattggctgcttagccagaaagtctgaaatcctgcttgattagccatattaataatgttgtcggggtaattatgaatgtcatgactcaaaacagaatcagcagttaaagaaaggggaacgctcagcgcagtgtaaggtgcgccgcttattgcttgattaaacagtttgatctgttttctttgtgcttcaacttgcggtgtcgtagagcgtgtatatccatacaaagacatattgtcgacacgtacagactcccccacaatcaacacgtaggtatcaatacctgtatccctgacacttaattgaaaatacggcaccgtgtttgcaatactgagtaatctttgatgctctttcgctgctaaagcaaaatagttgagattgaaaaacggcgtataggtagcaaatcggctcgctagtatatatggactgaacgcttttttattttttgcatctttataagcaaattgacaagcggaaaataaactgccgctaatgacaatcagcaataatattcctgtcactttttttgtcggcaaggaaacatcatattttattattactgccaaaaaaagaagggataaaaaagcaaaggcacatagataagggatatacatccccagcattttgacaacttcatccggatcactctggagcacactaatcgcaaatccatcattgaaagttgtaccaaaggtacaccaactatagaggctaatactcatgtctgccgcagtcagtaacacaaatggtgcggcaacaagcaggcgaagcggaagggaacttatacgttttacaaccaggatggtcagaacgaagaacagcaagcgctgaaccatatgcgctccggaagaagcgactaagttcgtaataccaaaaacaataacacaaagatacaacaaccaatgagatttaaaagttctagcaaatttgttgaatactgtcatccagaaatccaagttcacaaccaatataaacaattatcaacaatgtttaattttatatcagacatgtttttcaactctgatccatatcagaacgaaacactgttagttttttctttttaaatgatgcggccattgcgttctcagtaattaaataacattatcaatgcgtctctaaacattacgcagaacgtagccatcagtcgttatactgacaggagcaggatggtttatcgagaagtaaacatatccgtattcgtaccggaactggagttgacacaataaagtgccaattatgtcagtagaagggaaaaatttataactaaggcgtaccggcaccatcgtttcaaggtaccagctacgagtaaagcaactggacgagatacagatacctgacaaccattcctcagaccaggaccaaaacgaaaaaagacgcttttcagcgtctcttttctggaatttggtaccgaggacgggacttgaacccgtaagccctattgggcactaccacctcaaggtagcgtgtctaccaattccaccacctcggcacggatactactttttagttcgggatatcgctggtcggcttagccggagcagctggctgagtttgttcggttttcgccggtgcactcagattttcccattcgctacctttattggttttgttgctattgatgttacccagcaccagactgatgatgaagaataacgttgccagcagcgccgtcatgcgggtcatgaagttaccagaaccactactaccaaacagcgtagcggaagcgcctgctccgaaggaggctcccatatcagcgcctttaccttgctgcagcatgatcagaccaacaaggccaattgccacaataaggaaaactactaaaagagcttcatacataatcaacctgttccttgcggagttgccgcgtaccaatgcttcaaccaataaagcgggagtttttaatctttcccactgaagcgggtgtgaatactaaccaaagcgaatgaccttcgcaagggcaattttatcgcattgtatcaactgcggaaaaaaacagcaaaaccgatgtgttcgctgagaaaaaaggcgacaatcgccgcctttttagccagttatctaacgctttaaacggcttttactgcatcggcgatgcggtgtgcaaattcagtcacctgcgcttcgtcttcgccttccaccatcacgcgaattaacggttcggtgccggatttacgcagcaacacgcgtccacggttgcccagcgcagcttcaacctctgcggtcacggctttaacactctcatgctcaagtggatcgccgctacctgcggtgtaacgtacgttaaccagaatctgcgggaacattttcatgccgctgcaaaggtcgtgcaggctcatatggttacgtgccatcgccgccagcacctgcaagccagcaacgatgccgtcaccggtagtagttttatccagcaggatcacatgaccggaattctctgcaccgatacgccagcctttctcctgcattttttccagtacgtagcggtcacccactttcgcgcgcgcaaatggaattcctaactgtttcagcgccagttcaagccccatgttgctcatcaatgtacccacagcgccaccacgcagctggccctgacgaagaccttcacgcgcgatgatatacatgatctgatcgccatcgactttattgccttcatggtcaaccataatcacgcgatcgccatcgccgtcgaaggcaataccgagatccgctttttcagccagcacacgagcctggagcgcgcgaacgtcggtagcccccacttcggcattgatgtttacaccgtttggctcacaaccgatagcgataacgttcgcccccagttcgcgcagcacgttcggcgcgatgtgataagtcgcaccgtttgcacaatccaccacaatcttcagttcactgaggctaagttcgttcgggaacgtggctttgcaaaactcgatatagcgacccgcggcatcaacgatacggctggctttacccagttctgcgctatcaacgcagctgatctccttttccatttccgcttcgatggcctcttctaccgcatccggcagtttggtgccgtcgatagagaagaatttaatgccattatcgtagaacgggttatggcttgcagatatcacaattccggcctctgcgcggaaggtacgcgtcagataagccacggccggtgttggcatcgggccagtgaagagtgcggaaaggcccgctgccgccagacccgcttccagtgcactctccagcatatagccagaaatacgcgtgtctttaccaataataatcttacgggagccgtggcgcgccagcactttacccgcggcccaacccagcttaagcacaaaatcaggtgtgatcggcgcatcccctacacgaccacgaatcccatcggtaccgaaatatttacgattactcatagcgtttgttttcctttgcagacagagtggcttccaccacccgcatcgcttctacggtttctttgacgtcatgaacacgaatgatgtgcgcgccttgcattgcggcaatgaccgcacaggccagactaccgctcaggcgctcggacggccccacgttcagcagctgcccaatcatgctttttcgactcatacccaccaacagcggcaggttgaaatggtgaaattcagccaggcgcgccagtaaactatagttatgggagagatttttaccgaaaccgaatccggggtcgagcaacaatttctcttttgcgatacccgcctgctcgcaacgtgctatttgctcaataaagtagcgattcacttctgcaaagacatcgtcatacttcggagcttcctgcatggtttttggatttccctgcatatgcatcagacaaaccggtaaaccggtttctgcagccgcctccagagcgccaggttcggaaagggagcggatatcattaataatgtgagcgccaactttcgcactctcacggatgacttctggtttggatgtatcgacactgatccagacttcgaagcgttgagcaattgcctcaaccacaggaataacacgttgcaactcttcttcaacgctaacttccgccgcccctgggcgcgtggactcgccaccaacgtcaatgatcgtcgcgccagcgttgatcatcagattcgcatgtttcaccgcatctatcaggctgttatgcgtgccaccatcgctaaaggaatcaggcgtgacgttgaggatccccattacgtgaggatggctaaggtccagactagtaccctgggcaaagagtttcatgatgttatccctggtatgaattgataagaaaaaaccccggagcacgccccggggttttcggtacaaatacagtcatctgatgcgggaacttacttgtcgcctaactgctcactcatggtgttacccgggttcggcgtacgcggttcatcaaccggacgaggagcctttggactaccattgtcgccagaattgttagaagcgcctggttcttcccagcccgctggcggacgtacatcgcgacgtgccatcaggtcatcaatctgcggtgcgtcgatagtctcatatttcatgagagcatctttcatcgcatgcagaatatccatattgtcggtcagaagctgacgcgcacgattatagttacgctcaatcagtgctttcacttcctggtcgatgatacgtgcagtttcatcggacatatgtttcgctttcgctacgctacggccgaggaacacttcaccttcttcttccgcgtacagcagtggacccaatttctcagagaagccccactgagtcaccatgttacgtgccaggttggtcgcaactttaatatcgttggacgcaccggtagatacatgttccggcccgtagatgatctcttctgccagacgaccaccgtacagcgtagaaatctggctttccagtttctgacggctggcgctgattgcgtcgccctcaggcaagaagaaagtcacacccagcgcacgaccgcgtgggataatcgtcactttgtgcaccggatcgtgttccggcaccaggcgaccgataatcgcatgacccgcttcgtggtaagccgtgctttctttctgcgcttccgtcatcaccatggagcgacgttccgcacccatcatgattttgtctttcgctttctcgaactcaaccatgctcacaacgcgtttgttgccacgagcagcgaacagtgccgcttcgttcaccaggttcgccaggtcagcaccggagaaaccaggagtaccacgggcaatgattgccgcgtcgatatcgggtgccaatggtacgcgacgcatgtgaactttcaggatctgctcacgaccgcgaacatctggcaagccgaccacaacctgacggtcgaaacggccaggacgcagcagggccgggtcgagaacgtccggacggttagtcgcggcgataacgatgataccttcgttaccttcgaagccatccatctcaaccagcatctggttcagagtctgttcacgttcatcgtgaccaccgcccagaccagcgccacgctggcggcctacggcgtcgatttcatcgataaagatgatgcacggtgccgctttcttcgcctgttcgaacatgtcacgaacacgggatgcacccacaccgacgaacatttctacgaagtcagaaccggagatagtaaagaacggaactttcgcttcgcctgcaatcgctttcgccagcagcgttttaccggtacccggaggaccgaccatcaagacgcctttcgggatcttaccgccgagtttctggaagcggctcggctcgcgcagatactcaaccagttcagcaacttcttcttttgcttcgtcgcagcccgcaacgtcagcaaaggtcgttttgatctgatcttccgtcagcatgcgcgctttgctcttaccaaagctcatggcacctttgccaccgccgccctgcatttgacgcatgaagaagatccagacaccaatcagcaacagcatcgggaaccaggagatgaagatagaagccagcaggcttggttcttcaggcggttcaccgacaaccttgacgttcttggtcaacaggttatccagtaatttcggatcctgaaccggaatgtaagtggtataacggttactatctttcttggtaacgttgatttcacgtccgttgatacgcgcttcacgaacctggtcgttattgacctcttgtaggaaggtagagtaatccaccttacggccattagactcgctgggcccaaagctctggaatacactcatcagcacaacggcaatgaccagccagagtattaggtttttcgccatgtcactcaagggattaacctcttattacaactgtgttaaaaacagcgtcaggatactctatatccagcatctttcaaactttcgtctgaaatctcccggttagggtttacgcccggtcgctacaatatacacttcccggctacgtgcacgagaagagtccggcttacgaactttgaccttcgtaaacagggagcgaatttcccttagatactcatcgaaaccttcgccctggaacaccttcactacaaaactgccacctggcgctaatacatcacgacacatttctagcgccagttccaccagatacatggcacgggggatatccaccgccggtgttccgctcatgtttggtgccatatcggacatgacaacctggactttgctgtcgccaacgcgctccagcagtgctttcatcaccagttcatcacgaaaatcgccctgaagaaagtccacaccaacgataggatccataggtaaaagatcgcaagcgatgatgcggcctttgccgccaatttgggtgaccacatattgactccaaccacccggagcagcaccaaggtcgacaaccgtcattcccggtttaaagagtttgtcactttgctgtatttcatcaagtttaaaccaggcacgggaacgtaacccctttttctgtgcctgttgaacatatttatcgctaaagtgttcctgaagccagcggctggagctggcagaacgcttcttacctgtcatttaactttcccatggggataactcatcgtaaccaattgcgtaaatttttacgcgcctatttggtgatatatgggagatggcggtagaatgacccgttttcaatcccaacgtaagcaaaaaatacgatgaatctgagtactaaacaaaaacagcacctgaaaggtctggcacatccgctcaagccagttgttctgcttggcagtaatggtttgaccgaaggggtgctggccgagattgaacaagcgttagagcaccatgaactcatcaaggtgaaaatcgccaccgaagatcgcgaaactaaaaccttgatcgtggaagctatcgtgcgcgaaaccggcgcctgtaatgtacaggtcatcggtaaaacgctggtgctttatcgcccaactaaagaacgtaaaatcagcctgccacgctaagattatcctaaagttacacacatttgctgtgtaaaacgaggggttttccgcaggcaggagagcaaaatgccacgctctgttcgttgataaaaggccgcatagcggcctttttcctttctttacaatacatcaacatcttgagtattgggtaattcttacaggtattccaccttaattacttcaaattctacttcgccgcccggcgttttgatgaccacaacatcatcttcttctttgccgatcaggccacgagcaatagggctgtttacagaaatcaggttttgtttaaagtcagcttcgtcatcgccaacgatgcgataagtctgttcttcgtcagaatccagattcagcaccgttacggtagcaccaaaaataacgcgcccattgttgggcattttggtgacatcaatcacctgcgcgttgctcagcttggcttcgatgtctttaatacggccttcgcagaaaccctgctgttcacgagctgcgtggtattcggcgttttctttcaggtcgccatgctcacgcgcttccgcgatagcagcaatgatttcaggacggcgcacagatttcagaaaatccagctcttcgcgtaatttttcagcgccgcgtaaggtcatcggaatagcttgcatttgttatacctcttgaatattcctgatagggcaagtcttcacccaccccggctgttcggcctgcccggcataactccttaccgggaccagaagcaaaaaaataccgacccgggtacaagtcccaggtcagctacaattcacattttgatagtcattttaccctgaagttcccgaagggtcatcgtttactttatagggcgttgcgccgtagtatgacggctcgattccaggttgttagcgcgagattatgcgattttccagatttatcatcggattgaccagctgtatagcgttcagtgttcaggccgcaaatgttgatgagtacattactcaactccccgctggtgccaaccttgccctgatggtgcaaaaagtcggcgcgagcgcccccgctattgattaccacagtcagcagatggcgctgcctgccagtacccagaaagtgattactgcgctggcggcgttgattcaactcggccccgattttcgttttaccacgacgcttgaaaccaaaggcaatgtggaaaacggcgtacttaagggtgacttagtggcgcgatttggtgccgatccgacgttaaaacgtcaggatattcgcaatatggtcgcgactttgaaaaaatctggcgtcaaccaaatcgatggcaatgtgttgatagatacctccattttcgccagccacgataaagcccccggctggccatggaatgacatgacacaatgctttagcgctccgcctgccgccgccatagttgaccgcaactgtttctccgtcagcctctacagtgccccaaagcctggtgatatggcttttatacgcgtggcatcttattaccccgttacgatgttcagccaggtacgcaccctcccccgtggttctgccgaagcgcaatactgcgaactggatgtggtgccaggcgacctgaaccgctttacgctgacgggatgcctgccacaacgttctgagccgctcccgttggcttttgccgtgcaggatggagccagctatgccggtgcaattctgaaagatgagttaaaacaggcgggtatcacctggagcggaacactgctgcgccagactcaggttaacgaacctggaacggtagttgccagtaaacagagcgccccgctgcacgatctgcttaagattatgctgaaaaagagcgacaacatgatcgccgatacggttttccgcatgataggccatgcgcgcttcaatgtgcctggaacatggcgggccgggagcgacgccgtgcgtcagatcctgcgccagcaagccggtgtcgatattggaaacaccattattgccgatggtagtgggcttagccggcataacctgattgcccccgccaccatgatgcaggtgctgcaatacattgcccaacacgacaatgaacttaactttatctccatgctgccgctggcgggctatgacggctctttgcagtaccgtgcaggtctgcatcaggcgggcgtggatggaaaagtcagtgcgaaaaccggtagcttgcagggggtatataacctggcgggattcattaccacagcgagcgggcaacgaatggcgtttgtgcaatatctttctggctatgcagtagaacctgcggatcagcgtaatcgccgtattccgttagtgcgttttgaaagccgtttgtataaagatatttatcagaacaattaatcaaaaagaaaccccggcacatggccggggcttcagattattgacaaagtgcgctttgtttatgccggatgcggcgtaaacgccttatccggcctacaaaatcgtgcaaattcaacatattgcaattctcttgtaggcctgataagcgtagcgcatcaggctgatttggcgtttatcatcagtgattaacgcttgtaaatgaactcaacgccttcttcgtcgtcttcgtcccagtcgtcatcccagtcttcatcatcctcttcagcaatctcttcaagctgctggcgatgataatcatcccacatgaattcgactttctctggctgtttcgcttcttcagcctgcacgaccgggttttcaatgataaaggtcatcacatcccagcagagatctttcacgcccagtccactcgccgcagagatcagataatatttatcttcccagcccagcgcctcagcgatcgctttcgctttctcttcggcttctaccttatccagcagatcgatcttgttgaacactaaccaacgcggtttcgtcgccagatcctggctgtatttttccagctcgctgataataatacgcgcgttttcaaccggatcggtgccgtcaatcggatcgatatcgatgaggtgcaacaggacgcggcaacgttccaggtgcttcaggaagcgaatgcccagacctgcgccttccgcagcgccttcaatcagtcctggaatatcggcaacaacgaagctcttttcgttgtccattcgtaccacacccagacttggcaccagagtggtaaacggataatccgccactttcggtttagccgcgcttaccgcacgaataaaggtgcttttacccgcgtttggcatccccaacataccgacgtcagccagcagcatcagctccagcagcagctcgcgcttatcgcccggcgtgccgttggttttctgccgcggtgtacggttaacggagcttttgaaacgggtattgcccagaccgtgccagccgcccttagcaaccagcagacgctgaccgtgtttggtcatatcgcccatggtttcaccagtaccctggtcgattacacgcgtacctaccggcactttaatcgtcacgtctttaccgcgcttaccggtacagtcgcggcttgcgccattctgaccgcgctctgcacggaaagatttttcaaaacgataatcgataagcgtgttcaggttctcgtcggcttccatccatacgtcaccaccatcaccgccgtcgccgccatccgggccgcctttcggaatatacttttcgcggcggaagctcacgcaaccattaccgccatcacctgcaacgaccagaatgcttgcttcatcaacaaacttcattttattctccgtaaatcattcgcctgcgcggggttggcttaccaccgttgtatgcttacgtaatccgccccaaatacgatgaccaatggcggaatacatcgcgcccgcaaccacgacaaacgcaccgagataacctaaaaggtttaacatcggtctggcgaagaaatcgggccaggccagacttaaaagatcactaaaaaacagcgtaaacagtggggtgagcgtgatgatcgcgctcacctgcgctgcctgccagcgagccatcgcttccgccagggcgccatatcctaccaaggtattcagtccgcaaaaaattaaacatgcgagctgccagtggctaagctgcgctatcactccaggctttgccagagggaagagcgcaattgtacataaagtgtacagtaaaaacaggatctgcggactggccagccgacgcaataaaaccttttgcgccacgccataactcacccaaaccgtcgccgcaccgaccccaaagataactccccaggtgtaatcggtgagctttgtaaatatctcgaccagactggtgttaaaaaacatcaccaggccgctcaggagcatcaatgcccctacaacctgagtgctgcgcattttctctttgaggataaatacgctggcaaccatcatgccaactgggctgagttgcccaatcacctggctagcggtcggactcaggtattgcaaggaactgctgaacaggatgaagttcccaaacagcccggcggtcgccactgccaacaaaatcaaccagcgtggcttacgaaacacgcgtaatggcggcaacctcttcttcaccgcaagaatggcacccaggccaatactcgccatcaagaaacggtaaaacacgattgtcggaggttccatcacctccagcacctgcttcattgcgattggcaacgccccccagcaaattgctgtggtgagcgccaaaagaatgccaatgcctgcctgctgcttcataccgtattccctgcaaagcgcatttgcggattaacgtcgcaccatgcgcatttttaccggttatcgaatgtaaaaagccccgcaacgtgttgcggggctttcatccgttaccgggacgcgaaaaacttattcagcttcgatgctgataaatttacggtttttcgggcctttaacttcgaatttcactttaccgtctgctttagcaaacagagtgtggtcacgaccgcaacctacgttagcgccagcgtggaatttggtaccacgttgacgaacgatgatgctacccgccagaacggattcgccaccgaaacgcttaacgcccaggcgtttagcttcactatcgcgaccgttacgtgtggagccgccagcctttttatgtgccatttgaaatctctcctcaggtcttaggcgctgatgccagtaattttcacatcagtgaaccactgacgatggccctgctgcttacgatagtgtttacgacgacgaaacttaacgattttaactttctcgccacgaccgtgagcaacaacttcagctttgattacgccgccatcaacgaaaggaacgccgattttgacttcttcaccgtttgcgatcatcagcacttcagcgaactcaacagtttcgccagttgcgatgtccagcttttccaggcgaacggtctgaccttcgcttactcggtgttgtttaccaccactttggaaaaccgcgtacatataaaactccgcttccgcgcacaccttttcaatgattcagagtgcgctataaatattcacaatagggcgcgaatattacgcaaaacgcacgcctttgacaagtgctacagtcaatacacgaagaaaaaaaacacaacttgtacggtaacgtttatctgtgccattttttcagtacaatcaccctatattcctaaccataaaccctaagttgcctttgttcacagtaaggtaatcggggcgaaaagcccggcttttgcgatgaatttagaaaaaatcaatgagttaaccgcgcaagatatggcgggtgttaatgcggcaatccttgagcagcttaattccgacgtccaactgatcaatcagttaggctattacatcgtcagcggcggcggtaaacgtattcgtccgatgattgctgtactggctgcacgagctgttggctatgagggaaatgcgcatgtcaccattgctgccctgatcgagtttatccacacggcgactctgctacacgacgacgttgtggatgaaagtgatatgcgcaggggtaaagctaccgccaacgccgcatttggcaatgccgccagcgtgctggtaggcgattttatttatacccgcgctttccagatgatgaccagcctcggtagcctcaaagtgctggaagtcatgagtgaagccgtaaacgtcatcgcagaaggtgaagttctgcaactgatgaacgttaacgatccggacatcactgaagaaaactacatgcgcgttatctatagcaaaaccgcgcgtctgtttgaggctgccgcgcagtgttccgggattctggctggctgtacgccggaggaggagaaaggcctgcaggattatgggcgctatctcggcactgctttccagttgatcgacgatttactcgattacaatgccgatggcgaacagttaggtaaaaatgtcggcgacgatctgaacgaaggtaaaccgacgctgccgctgctgcatgcgatgcatcatggcacaccagaacaggcacagatgatccgtaccgccatcgaacagggtaacggtcgccatcttctggaaccggttctggaagcaatgaacgcttgtggatctcttgaatggacgcgtcagcgtgccgaggaagaagcagacaaagccatcgcagcgttacaggtgctcccggacaccccttggcgagaagcactcatcggcctcgcgcacatcgctgttcaacgcgatcgttaatcccctcccctcatcccgcgcagcgcgcgggatggttccagtaagttccataaaaacacttattcagctctataacacctgaaaaatagggatgtgcatctttatatattctgaatattcacactctttacaggaactttttagagcaataggccatcaggagtatagtgatgctcgacagaagaagtgttctgaatgaaagcgactaacttaaggagtgaggaaaaatggaaagtaatttcattgactggcatcccgctgacatcattgcgggtttgcgcaagaagggaacgagtatggcggcggaatctcgcagaaatggtttgagttccagtacgctggcgaatgcattaagccgcccatggccgaaaggagagatgattattgcgaaagccctgggaactgacccctgggttatctggccaagtcgctaccatgatccgcagacccatgagtttatcgacagaacgcagttgatgcgtagctacactaaaccgaaaaaatgagtggtctggcggtagccccgcgaacggggctgccagctctcagacgattattcgcctttcacacgctcaatatttgcacctaaagcgcgcagtttgtcttcaatgcgttcgtagccacgatcgatgtgataaatacgatcaaccaccgtcgtcccttccgcaatacagccagccagcaccaggcttgcacttgcacgcagatcggttgccataacctgtgcgccagaaagtttttcaacaccgtgacaaataacggtattgctttcgatttcggcgtgcgcgcccatacggctcagctctggcacatgcataaagcggttttcaaagaccgtttcggtgataaacccggtcccttctgccaccaggttcaacagcgtgaactgggcctgcatatcggtcgggaatgccggatgcggcgcggtacgtacgttaacagccttcggacgtttgccatgcatatccaggctaatccagtcttcgccgacttcgatgtccgctccagcgtcacgcagtttcgccagcacggcgtcgagagtatctggctgcgcgttacggcagataattttgccgcgagaaatcgccgccgccaccaggaaagtaccggtttcgatacgatccggcagaacgcgatagacaccgccgcctaaacgttccacaccttcgatgacgatacgatcggtgccctgaccgctaattttcgcacccagcgtaatcaggaagttcgcggtatcgacgatttccggttcacgcgctgcgttttcaataatcgtggtgccttccgccagggttgcagcacacatgatggtcaccgttgcgccaacgctgactttatccatcacgatatgtgcacctttcaaacgaccatcgacggaagctttaacgtaaccttcttccagtttgatggtcgcgcctaattgttcgaggccagaaatgtgtagatcaaccggacgcgcaccgatcgtacaaccgccaggtagactaacttgcccctgaccaaagcgcgctaccagcggccccagcgcccagatagaagcacgcatggttttaaccagatcgtaaggtgcgcagaatacattaacgtcgcgggcatcaatatgcacagaaccattacgttctactttcgcacccagctggcttagcagcttcatacttgtatcgacgtctttcagtttcgggacgttctggatctctaccggttcttccgccagtagtgcggcaaaaaggataggcagagcagcatttttagcgccggaaattgtgacttcgccctggagcttcgttggcccctgaacacgaaatttatccatttagtttgttctcagttaacaattcatatccgctaccggcgaatcgcccatagctcaaaagccgttcagtttgcgatcgcgcgcccactccgcaggggtatacgctttgatgctcacagcatgaatgcggttatccgcaatatattccatcagcggaccatagaccgtctgctgttttttaacccgactcatgccgtcaaacaactcacccacggcaataacctgaaagtggctgccatcgccggaaacgtggacttcctggagggagagagcgttcatcaacacgctctgaatttcattattttccatgggatcttcaatcatcagttaataaaccagcgaaacatcttagagcaaagttgcgctggcataaataagcaaaaagcctcgctgataaatcagacaaggctcgacttgcaggcaggtttgccggacaggcggttaacgccatatccggcctgaaaaaatttaacgaggcagaacatcagcaggcaaattatacaatttcgccagggtatacactttgtcgtttaccccctgaagcgtcacattgttgccctgctttttcgccagatcgataagatggagcagcagtgccagtccccccgtatccacgcgggagacacggctaagatcgatgcaggtaatccccttcaccgcttcctcacgcatttcccaaagcggtagcaaaacgtcctgatccagctctccggataacgccagcgtgtcacccgtctgcatccagctcagactctcgctcattattttttctcttccagagtgattttctgttgagaaatgcttttcagttgcgcagtcaggccgtcgatacctttggtacgcagcagcgttccccactcgttttgtttggtggtgatcatactgacgccttcagcaatcatgtcgtaagcctgccaattgcccgtctgggagtttttacgccactggaagtccagacgcaccggcggacggccattcgggtcaataatggtaacgcgaataggcacaatggttttatcgcccagcggctgttctggcgcaatctgataggtttgaccgtgatacatcgccagcgcctgaccgtaagcctgcttcaggtactcacggaaagcggcaaagtaggcttcacgttgagcaggggtcgcactcttgtaatactggcccagcaccagcgcaccggcgtatttcacctgtacgtatggcagcagttcctgatcaacaatggtacgcagataatccgggttggcccgaatttgcggttgctcattcttcaggcgatcgaacgttttctgcgccgcctcgtccatcagcttatacggattggtctggtctgccgcggttgccgcactcagaggtgcaatcaccagcaaagcgaccatcattaaacgtttaaacatgcgtcggttctcctgaaattatttcgttgtacccacaggttcagtggtttcattattacctggcgcagcagctggcgcatcgccactattcttattgtcatcgcctttactaccgtaaaggaactgaccaatgagatcttccagcaccatcgcagacttagtgtcctgaattgtatcgccatccttcaggatagcagtccccagttccgggtcttcaaaaccgacgtttaatgccagatattgttcccccagcaggccggaagtacgaatgctcaggctactggtatctggaatgtggttataacgttgttcaatttccagcgttacgcgcggcagataggttttcgggtccagcgtaatatccgccacccgacccacaacaacgccaccaatactgaccggagagcgcgctttcaggccgccaatgttatcgaacgtcgcataaagcgtgtaggtcggttcagtacgtatggacgtcacgttcgccgccttcaggcaaacaaacagcgccgccagcagtgctgctaataaaaagatacccacccaaatttcattttttttcgtttgcatgaactcaattcccaaacatcaatgcggtcagcacaaaatccagccccagaacagccagagagctgtggacaacggtgcgagtggttgcccggctaatcccggcagacgtcgggatggcgtcgtagccgttaaacaagctaatccacgtcaccgtgatggcgaacaccacgctcttaatcagacagttgaccagatccatacgccagtcgacggcattttgcattgcgctccagaagaacccgctatcaatgcctttccaactgacgccgaccagagatccgccccagatccccacggcgacgaaaataaccgtcaacagtggtaaactaataaccccagcccagaaacggggagaaataacccgacgcagcggatccaccgccatcatctccatactggagagttgctctgtagcgcgcatcaggccgatttctgcggttagcgcgctaccagcacgcccggcaaacaacaacgcggcaaccaccggccccagttcacgcagtaggcttaacgccaccagcatacccagactggtttccgcactataagtggtcagaaccagataaccttgcagccccaacaccattccgatgaacacgccagaaaccacaataatcagcatgctcaggacgccgacattatagagctggcgcaccagcagcggcgcatgtttgcgaaattccggtttgccgaccagcgcattgaataacattaacccggcccgcccgaacgttctcagggttttaatccctttatgtccgaggctcgccagcgcatttaacagcatgagtggcttaactccctggtaaaagatcagcgtgataatcgccggcaggatagcggaacggaacaggcccgtcagctatcccgtccagaaactgacgtacgcgcggatcaggattcgcctgcaacgcctgggcactgccatgagcgacaatttttttgtccgccaggatccaggcgtgatccgcaatacttaacacttccggcacatcgtgagaaaccaccacacaagtcacgcccagcgcgctgttcagctcagaaatcagcttcaccagtacgcccatggtgatgggatcttgcccaacaaaaggttcatcaaacatgatgagatccggctccagcgcaatcgcacgcgccagcgctgcacgccgcgccatcccaccggaaagttcagaaggcattagtttagccgctccacgcagccccacggcctccagcttcatcatcaccgtactatgcaacaatggcgcgggaagttgggtatgttcgcgcagtggataggcgacgttgtcaaatacgttcatatcagtgaacaacgccccggactgaaataacatgctcatccgtttgcgcactgtatacaggcggctacgagacatcgccggaatattctcaccatcgaaaaggatctcaccatgatctggtgcgatttgcccgccaatcagacggagtagcgtcgttttaccgatgccgcttggccccatgatcgccgtgatcttccctcgcggcacggtcagggaaatattatcgaagatgcagcgattgccacgcgtaaaactgacatcgcgcatatcgactaaattcgccacagactgctccataattcacccttcgtcttgcgttgattttctaagcatggcgctcaatttaaccttgaacccaacatatttacagaatattacccgccgtggttagcgaaagctggcatttgttttactttttagccgcataaagtcaaaattaagcatccgttacggctttctgaaaatcttcagcggaccggcgagtatacctgaagaaaggacgttagatgcttttagctacggcactgttaattgttggtttacttttggtcgtttacagtgccgaccgcctggtttttgccgcgtctattctttgccgaacctttggcatcccgccgctgatcatcggcatgacggtggtcagtattggtacaagcttaccagaagtcatcgtcagccttgccgcgtctctgcacgaacaacgcgatttagccgttggtacagccctcggcagtaacattatcaatatattgctgatcctcggtctggctgcgctggttcgtccttttaccgtccattctgatgttctacgccgtgaattacccttaatgttgttggtcagcgtggtggccggttccgtactctatgacggacaacttagtcgcagcgatggtatctttctcctctttctggctgtgctatggctgctgttcattgttaaacttgcacgtcaggctgaacgtcaggggactgacagcctgaccagagagcagcttgcagagctgccgcgtgacggcggattgcccgtcgcgtttttatggctcggcattgcgcttatcatcatgccagtggccacgcggatggtggttgataacgccacggtgctggcgaattactttgccatcagcgagttgacgatgggtctgacggcaattgctatcggaaccagcctgccggaactggcaaccgcaatagcgggggttcgcaaaggtgaaaacgacattgctgtcggaaatatcattggcgcaaacatttttaatattgtcatcgtgttgggtttacccgcgctgataacgccaggagagattgatccactggcgtacagtcgtgactacagcgtgatgttgctggtgagcattatttttgcgttgctgtgctggcggcgctccccgcaaccgggccgtggtgtaggggtattattaactggcggatttatcgtatggctggcgatgttgtactggttaagcccaatactcgttgaataactggaaacgcattatgagccacgtagagttacaaccgggttttgactttcagcaagcaggtaaagaagtcctggcgattgaacgtgaatgcctggcggagcttgatcaatacatcaatcagaatttcacgcttgcctgtgaaaagatgttctggtgtaaagggaaagttgtcgtcatggggatgggaaaaagcgggcatattgggcgaaaaatggcggcaacgtttgccagcaccggtacacctagttttttcgtccatcctggtgaagccgcgcatggtgatttaggcatggttaccccacaggatgtggtgattgctatctctaactctggtgaatccagcgaaatcacggccttaattccagtgcttaagcgtcttcacgtaccgttaatctgcatcaccggtcgcccggagagcagcatggcgcgcgccgcagatgtgcatctgtgtgttaaagtagcgaaagaagcctgtccgttagggctggcaccgaccagcagcaccaccgccacgctggttatgggcgatgccctcgctgtcgcgctgttaaaagcacgcggctttactgctgaagattttgcgctcagtcacccaggcggcgcactgggtcgtaaacttctgctgcgcgtaaacgatattatgcatacgggcgatgagatcccgcatgttaagaaaacggccagtctgcgtgacgcgttgctggaagttacccgcaaaaatcttggtatgactgtcatttgcgatgacaatatgatgattgaaggcatctttaccgacggtgatttacgccgtgtcttcgatatgggcgtggatgttcgtcagttaagtattgccgatgtgatgacgccggggggaatacgtgtgcgccctggcattctggccgttgaggcactgaacttaatgcagtcccgccatatcacctccgtgatggttgccgatggcgaccatttactcggtgtgttacatatgcatgatttactgcgtgcaggcgtagtgtaaagattcaaggataaacaacaatgagcaaagcaggtgcgagccttgcgacctgttacggccctgtcagcgccgacgttatagcaaaagcagagaacattcgtctgctgatcctcgatgtcgatggcgtactgagtgatggcctgatttatatgggcaataatggcgaagagctgaaagcgttcaatgttcgtgacggttatggcattcgttgtgcgctcacctctgatattgaagtcgctatcattaccgggcgaaaggctaaactggtagaagatcgttgtgccacattggggatcactcacttgtatcaggggcagagtaacaaactgatcgcctttagcgatctgctggaaaaactggcgattgccccggaaaatgtggcttatgtcggcgatgatctcatcgactggccggtaatggaaaaagtgggtttaagcgtcgccgtggccgatgcgcatccactgttgatcccgcgcgccgattacgtgacgcgcattgctggcggtcgtggcgcagtgcgcgaagtttgcgacttattactcctggcgcagggcaaactggatgaagccaaagggcaaagcatatgagtaaagccagacgttgggttatcattgtgctaagtctggcggttctggtgatgatcggcattaatatggccgaaaaagacgataccgcccaggtggtcgtcaacaacaatgatcccacctataaaagcgagcatacggacacgctcgtctataacccagaaggggcactaagctatcgattgattgctcaacacgttgaatattattccgatcaggccgttagctggtttacgcagccggtacttaccacgtttgataaggataaaatcccgacatggtccgtaaaagcagataaagccaagctgaccaatgaccggatgctctatttatatggacacgttgaagtcaacgcacttgtgccagactctcaacttcgcagaatcacgacggataacgcgcagatcaatctggtgacgcaggatgttacctctgaagacctcgtcacgttatacggaacaacatttaactccagcggtctgaaaatgcgcggcaacttacgcagcaagaacgccgagctgattgaaaaggttagaacatcctatgaaattcaaaacaaacaaactcagccttaatcttgtgcttgccagcagtcttctggccgccagcattccggcatttgccgtaaccggagacactgatcagccgatccacattgaaagcgaccagcaatctcttgatatgcaaggcaacgtggttacctttaccggtaatgtcatcgtcacccagggcaccatcaaaattaatgccgacaaagtggtcgttacccgtccgggcggcgaacaaggtaaagaagtgattgacggctacggtaaaccggcaacgttctaccagatgcaggacaacggtaaacccgttgaaggtcacgcttcccagatgcactacgaactggcaaaagattttgtcgttctgacgggtaatgcttatctgcagcaggtcgatagcaacattaagggcgataagatcacttacctggtgaaagagcagaaaatgcaggctttcagcgacaaaggcaagcgcgtaacaaccgttctggtgccgagccagctgcaggacaaaaacaacaaaggccagaccccggcacagaagaagggtaattaattcgttatggcaacattaactgcaaagaaccttgcaaaagcctataaaggccgtcgcgtggtagaagacgtcagcctgaccgtcaactccggggaaattgtcggtctgctggggccaaacggtgccggtaagaccaccactttctacatggttgtaggcattgtgccgcgcgatgcgggcaacatcattattgatgatgacgatatcagtctgctgcctctgcatgcacgcgcgcgccgcggtatcggctatctgccacaggaagcctccattttccgtcgcctcagcgtttacgataacctgatggcggtactgcaaattcgtgacgacttgtctgctgaacaacgtgaagaccgcgcgaacgagctgatggaagagtttcacattgagcacctgcgtgacagcatggggcagagtctctccgggggtgaacgtcgccgtgtagaaattgcccgcgcactggctgcgaatccgaaatttattctgctcgacgaaccgtttgccggggttgacccgatcagcgttatcgacattaaacgcatcattgagcacctgcgcgacagcggcctgggcgtgctgatcactgaccacaacgtgcgtgaaacactggcggtttgtgaacgcgcttatatcgtcagtcaggggcatttgatcgcccacggcacgcctacagaaatcttacaagacgaacacgttaagcgtgtataccttggggaagacttcagactctgatagggtagaagtttgcgacgttttagcaggagagtacgattctgaacatgaagcaaggtttgcaactcaggcttagccaacaactggcgatgacgccacagctccaacaggcaattcgtctgttgcagttgagcacgctggaacttcagcaggagctacagcaggcgctggagagtaatccgctgcttgagcaaatcgacactcatgaagaaatcgacacccgcgaaacgcaagacagtgaaacgctggacaccgccgacgcgctcgaacaaaaagagatgccggaagagctgccgctcgatgccagttgggacaccatttacaccgctggtacaccatccggcaccagcggtgactacattgacgacgagctgccggtctaccagggcgaaacgacgcagaccttgcaggattacctgatgtggcaggttgagctgacaccgttttccgacactgaccgcgctattgctacctctatcgtcgatgccgttgatgaaaccggttatctgactgtcccgctggaagatattctcgaaagtataggcgatgaagagatcgacatcgacgaagttgaagccgtccttaagcggatccaacggtttgatccggtcggtgtggcggcaaaagatctgcgtgactgtctgctgatccaactctcccaattcgataagaccacgccgtggctggaagaggccagactgatcattagcgatcatctcgatctgttagccaatcacgacttccgcactttaatgcgcgtcacgcgtctgaaagaagatgtgctgaaagaagccgtcaatctgatccagagcctcgatccgcgccccgggcagagcatccagactggcgaacctgagtatgtcattccagatgtgctggtgcgtaagcataacggtcactggacggtagaactcaacagtgacagcattccgcgtctgcaaatcaaccagcactacgccagcatgtgcaataacgcgcgcaacgatggtgacagccagtttatccgcagcaatctgcaggatgccaaatggttgatcaagagtctggaaagccgtaacgatacgctactgcgcgtgagtcgctgtatcgttgaacagcagcaagccttctttgagcaaggtgaagaatatatgaaaccgatggtactggccgatatcgcccaggctgtcgaaatgcatgaaagcacgatatctcgcgtgaccacgcaaaaatacctgcatagtccacgaggcatttttgaactgaagtatttcttttccagtcacgtcaataccgagggcggcggcgaagcttcctccacggcgattcgtgcgctggtgaagaaattaatcgcggcggaaaacccagcgaaaccgttgagcgacagcaagttaacctctttgctgagcgaacaaggtatcatggtggcacgccgcactgttgcgaagtaccgagagtctttatccattccgccgagtaaccagcgtaaacaactcgtttgacccaaccgataaggaagacactatgcagctcaacattaccggaaataacgtcgagatcaccgaggcactgcgcgaatttgttacagccaaatttgccaaacttgagcaatattttgaccgaatcaaccaggtctatgttgttctgaaagtggagaaagtcacccacaccagtgatgcaacactgcatgtaaacggtggtgaaattcatgccagcgcggaaggtcaggacatgtacgctgccattgatggcttaattgataagctggcacgccagttgaccaaacataaagataaactgaaacaacactaattgtccgggcaattagcatgtgcatggcggtctgttgtgcggcacaacgggccatttgtacggttaatgctccgagcctgttccactgtttgagtgggcaggttcttaggtgaaattatgacaaataatgatacaactctacagcttagcagtgttcttaacagggaatgtacgcgaagccgcgtccactgtcagagcaaaaaacgcgccctggaaatcatcagcgagctggcggcgaaacaacttagcctgccgcctcaggtggtttttgaagctatcctgacgcgggaaaaaatgggcagtaccggtatcggcaatggtattgccattccgcatggcaaactggaagaagatactctgcgcgccgttggcgttttcgttcagctcgaaacgcctatagctttcgatgccatcgacaaccaaccggtggacttactttttgccctgctggtgccggcagaccaaactaaaacgcacctgcatactctgagcctggtggcgaaacgtctggcggacaaaaccatctgccgccgtttacgcgcagcccagagcgatgaagagctgtatcaaatcattacggataccgaaggtactccggatgaagcgtaattattcggtaatgtctcttttagacgttgtgaggagaaacagtacatggtactgatgatcgtcagcggacgtagtggtagtggtaaatctgtcgccctgcgtgcgctggaagatatgggtttttactgcgtggataaccttcccgtagtgttgttacccgatctggctcgaaccctggccgatcgcgagatttctgccgccgtcagcattgatgttcgtaatatgccggagagtccagaaatattcgaacaggcgatgagtaacctgcctgacgctttcagtccgcaactcctgttcctggatgccgaccgtaataccttaattcgtcgttacagtgacacgcgccgactgcatccgctttccagcaaaaacctgagcctggaaagtgctatcgacaaagaaagcgatttgctggagcctctgcgtagccgagcggatctgattgtcgataccagtgaaatgtccgttcacgagctggctgaaatgctgcgtacccgtctgctgggtaaacgtgaacgcgaactgaccatggtctttgagtctttcggcttcaaacacggtatccctatcgatgcagattacgtctttgacgtgcgcttcttgccgaacccgcactgggatccgaaactgcgtccaatgacaggtcttgataaacctgtcgccgcgttcctcgaccgccacacagaagtacacaattttatctaccagacgcgaagctatcttgagctatggttacctatgctggaaaccaacaaccgtagctacttgacggtcgccattggttgtaccggcgggaagcaccgtagcgtgtatattgcagagcaactggcagactacttccgcagccgcggtaaaaacgtccagagtcgccatcgtacgctggaaaaacgtaaaccatgaccgtcaagcaaactgttgaaatcacaaacaagctgggcatgcatgcccggcctgcaatgaagctgtttgaattaatgcagggttttgacgctgaagtgctcttacgtaatgacgaaggcaccgaggctgaagccaacagcgttattgcgctgctgatgttggattctgccaaaggacggcagattgaagttgaagcgaccggtccacaggaagaggaagcactggccgccgttatcgccctctttaattctggttttgatgaagattaatcttcatcactttgacatacaactcccttcaaactccccccgacaataagaaaatcacgtactgaaatcgttctcaatcaacgtcatttgtacattttgtgcgcttttcactttcagaagaaccttaagaaaaccttaagaggcattgtttaggttttgtttaagttaatcgaccatactggagatcgtcagaaaatatttccaggagatggcatgattcgcttatctgaacaaagtcccctgggcaccggaagacatcggaaatgttatgcgcatccggaagatgcccaacgctgtatcaagattgtctaccatcgtggcgatggtggcgataaagagatccgccgtgagttaaagtactacgcgcatcttggtcgccggttaaaagactggagtggaataccgcgctatcacggtaccgttgagacggattgcggaaccggttatgtctacgatgtgattgcagattttgacggcaagccttccattacgctgaccgaatttgctgaacaatgccgttacgaagaagacattgcacaactgcgccagctactgaaacagctgaagcgttatttgcaggataaccgtatcgtgacgatgagcctgaagccgcagaatatcctctgtcaccgcatcagtgagagtgaggttatcccggtcgtctgcgacaacattggtgaaagcacattgattccactggcgacctggagcaagtggtgttgtctgcgtaagcaagagcggttatggaaacgatttatcgcccaaccggcgctggctattgccctgcagaaagatctgcaacctcgtgagagcaaaacgctggccctcactagccgcgaagcttaatccagctggtgttgttgcataaacggctcaccgcctaactgatacatctgccgtaaaatccacgcctgacggctacgcacgtagccgcttgggctggagactttgaaacgaagtggattaggtaatacagctgccagtaatgcagcttcgctccgggtaagtttgctcgcgggtttgtggaaataacgttgtgccgcagcttcgacgccaaacacaccgtcgccaaattcggcgatattcaggtaaaccgtcaggatacgctttttgctccagaccgtttctatccccagcgttaatccggcttccagcccttttcgaacccagctacgcccatcccataaaaagagatttttggctgtctgttgagaaatcgtactagcaccgcgaatacggttttcattgcgctcgttgtgcgccagggctttctcaatggaagcgacatcaaagccccagtgctcaggaaatttctgatcttctgcggcaatcaccgccagtcccatccacgggctgatttgatccatactgacccagtcagaatgtgccacgtaacgaaaattgccatgcagccaggcgctgacctgtcgctcgaccattaccgcactgaagggaacaggcgcaacgctaaacaacgcgatgcccccgccccagaaaacggcgaggacaaccattaaccgcaaaagaaaacggcgaacgaaactaaacaccgttaagcggcttttactcattcagccagaaccagcacgcgggaaaccagcttatcaatgccgctcgccgcttctgcaatgttctgcgccagcatatatgctggggtggtgacaatcttattgtcttcatcaaccacgatatcatcgacaggacacggcacatgctccgcgcccatctcttccagcacttctgcggtatcgatatcagtaccgatggtcaaacgcagcgggaaatcgaaaattttcggcagcatcgccggggcaatacacataaaaccaagcggttttccggcctgatgcatcgcttgtgccagcgcctttaattcacggtcaacggtgcattcgctaccaagactggcaaaattgcttaaattcttcgccgcgccaaacccccccggcacaatcaacgcatccagttcagcggcatcggcctgggccagaggacggatttcaccgcgcgttattcgtgccgcttcaatcagcacattgcgcgtttccgtcatcgcttcgccagttaaatggttgataacatcaacctgctgcttatccggtgcaaagcagaccgcctgcgcaccgctgcgactaatagctaacaacgtcaacaccgcttcatgaatttcagaaccgtcatagacgccgcatccgctcagaattacgccaattttcttcattgtgatcatcctttcgcaattgactgaaacacattaatttttttaataaaaatggtacgcatcacacatttaactgattcatgtaacaaatcatttaagttttgctatcttaactgcgtgcggcctgaaaaacagtgctgtgcccttgtaactcatcataataatttacggcgcagccaagatttccctggtgttggcgcagtattcgcgcaccccggtctagccggggtcattttttagtggcttttgccacccacgctttcagcacttctacgtcgtgacgccactcttctttcatctcttcaatccattcaccgacgttatcttcccaggccggaaggtcaggagactgaatttgctgacccagctgttgcagatggcgtaaccccacactccccgccgcacctttaattttatgtccttcctcaacaatgccttttttatcctgcgccgtcagattgctctccagcacgctgacatagcccggcatcatcttctcaaacaccgctaacccgtcggtgatcagcttcggtcctacaagttcgagatactgttccagcatgggaatatcgagcaatgcttcacttttactgttctcttctgtcgtcaccgtactctcctcatcatcctgggtatcccagaatttcttgatcatcgcggttagcgccggaacagaaagcggcttactcagcacatcatccattccagcattgaggtactcttgtttgtctttcagcacgttagcggttaaggccaccagcggcggtaaatcctcgcgcggataacgtttcgtcagttcacgagagatatccagcccggtcatatctggcaactgaatatccagcaacaccaggtcgtattcgcccggtttaaacatctccagcgccgccttgccggtcatggcgacatcaacgctgttacctaatttttccagcacagaacgcgcaacaatcacgttcagttcaatgtcttccaccagcagcacattcagcgccggtaaaggcatatcgtcttcatcaaacgcatcatcgacctcttctgctacgctcggtgcgtggatcgtcaacgtaaaggtactacctttgccctgttcgctggtaaccgtaatatcgccgcccatatttttcgccagacgacgagaaacggccagaccaataccggtgccggtggcaggtttaccgccatgactgtctttcacctggtaatacatggcgaaaattttatccagctcatcctgcggaatgccgataccagagtcttccacttcaaaatgcagcatatcgccttcatcgtagcgcacgcgcacggtaacctggccttgctgggtgaatttgacggcgttactgatgaggttccacaggatctgccgtaaacgcgtcccgtcggtaatgacctgatgcggtaatggcagcgtcggctccaggttaaagcgcaatcctttttgttgcgcctgcaatgcggagagattttccagatcggcaaggaagctggtgaaatcaaccggttgattatcaagctggaccttgcgccgttccatcttatccatgtcgataatatcgttaaagatattccccagcgtgacggcgctaacatggatggtcttgagatatttttcctgctcggcggtgagttcggtatccagcagaatgcggctcagaccgacgataccgttcagcggtgtacgcaattcgtgactgatggtggagataaacgtcgttttgtcgcggctggcccgttcaagcgcatcctgataccgcttacgctcggtaatgtcgcgaccaaagcccatcaaaccgtgacgtttacccacgcggtcgtagtacggcactttacggatttcaaagcaggctttgcgcccgtccgggtaatccagccactgttcataggtcagactcacattatgacggaacactttttcatcggtttcaatgacttttgcggcggcttccggactgtaaacatcagcaggtttcaggtgaaccagttgtttttcgctttttccggtcagcagctccatcgcgcggttacagccggaaaactctttatcttcgttacgataaaaaaccaggtcgggactagcatcaaggaaggaacgtaagaaactggattgctgctcgagctgaatttgtgtctcttcgcgctctttgatttcaattttcagttggccgaaggtttcctgcagttctgcttccgctttttcacgaacggcaatttcctgatttagctgggcaatattatcttttaactgaacgttgaggctcaaatcgcgctcgcgcatctcctccagtttttgcaccagccgactcagacgttgtcgactctcctccagttgctcgacgaccacgcttagaaagtagaccgcccacggcgtaatcagcaaaccaaagaagatagaacgaataacatcaatgctttcgacctgaccatgcagcaccatggttaccgccatttgtaccacaatggcaagaacgacgagggccagcgccagcaacatactgaagcgcaccagacctaacttcatcatcaggtcaacataatactgcgccagcagacgaatttgcttcattagggaattccttcacgacaacctgccccaataatacccaattctgacagttacgttataaattgtgtgagaaatgcggaattcccctcaacgacttactccgttggaggtagccacggacgtcccagcgcgcttccctgtacgccatgttcattcagatagcgatccagctcgaccattcccgtccatcgattttcgcaccacagcggagcaagcagcgtcgggcgacgggcgctggcggaaatgcggtggtagatcacttccggtggcgtatggcgaatcatttctccggcagtgagcgtgtaatcctccagttcaataccgttcaaacgccccgcttcccaggctttcgccataatgctgcctttcacaatatgcagcggatgcagctttatgccgtccacgccggtttcaaccactcgctccagcgtttgcaaacattcagcctgcccttcgccaggcaggccgacaattaagtgggaacacaccttcagcccgcgctgacgtgccagctgggttgtacgctgataacaggcaaaatcatggccgcggttgatgcgatgcagtgttttgtcgtgggcggtttgtagccccagctccagccacacttcgtaaccctggtccttatattcgcaaagcagatccagcaccgcatccggcacgcagtccgggcgggtacccacacacaaaccgacaatattggcctggctcaccgcctgctgatacatagaacgcagcacctgaacttccgcaaaggtgctggtatacgcctgaaagtaggccagatagcgtttagcgcggttaactaaattcgcctggtgcgccagttgctcggcaatggaacgatgctgctgcgcttcatcggcaaagctggcaacattacagaatgtgcagccaccacgcccgatggtaccgtcacggttagggcagctaaaaccgccgtgcagcgtcagcttatgcaccttttgcccataacgacgggtgagatcaccaccaaacatattgactaatttctgtaactgcataatctgatagaccgcgccttgaaaagaggccaaagcctgccatttttagctcaattcggcgatgacctggatcaatcgtcccggcctgcttttatcaactgcataatcaatcaaaattaccgaaatttcatgcataatcacataaatcacttttgcttatcttgtgtcagatttttttatctcctgatggattttaggcaaaaacagtagcatgaaacgtcattaccaattaaggcagtataaaatgctggttttgtcgtcagttcaaggcaggataagggttaacacacctttatgacagtcaggaattgactgtttctctaacgacttcccttttagccttaaagataaaatccattttaatttcagtcatttaataaagaattttgcgctaaagcacatttctgtaccaataagcttgccatttgacctgtatcagctttcccgataagttggaaatccgctggaagctttctggatgagcagcctgctcatcatatttatgcagtaattgagatcccctcttcaccgtattaaccgatgcgaaaaggacaacaagggggcgaatgcgaggcgcgcgtatgacacgcaaaccccgtcgccacgctctttctgtgcccgtgcgcagcggtagcgaagtggggttcccgcagagcctgggggaggttcacgatatgttgtacgataaatcccttgagagggataactgtggtttcggcctgatcgcccacatagaaggcgaacctagccacaaggtagtgcgtactgcaatacacgcactggcccgcatgcagcaccgtggcgcgattctcgccgatggtaaaaccggcgacggttgcggcttgctgttacaaaaaccggatcgcttttttcgcatcgttgcgcaggagcgcggctggcgtttagcaaaaaactacgctgtcgggatgctcttcctgaataaagatcctgaactcgccgctgccgcacgccgcatcgttgaagaagaactgcaacgcgaaaccttgagcattgtgggctggcgtgatgtccccactaacgaaggcgtgctgggtgaaatcgccctctcctctctgccacgcattgagcaaatttttgtgaacgccccggcaggctggcgtccacgcgatatggagcgccgtctgtttatcgcccgccgccgcattgaaaagcgtctcgaagccgacaaagacttctacgtctgtagcctgagcaatctggtgaacatctataaaggtctgtgtatgccgacggatctgccgcgcttttatctggatcttgcggacctgcgtctggaaagcgccatttgcctgttccaccagcgcttctccactaacaccgtaccgcgctggccgctggcgcaaccgttccgctatctggcgcataacggtgaaatcaacaccatcaccggtaaccgccaatgggcgcgtgcgcgtacttataaattccagacaccgcttatccctgacctgcacgacgccgcaccgttcgtcaacgaaaccggctctgactccagtagcatggataacatgctggaactgctgctggcaggcgggatggatatcatccgcgccatgcgtctattagtaccacccgcctggcagaacaacccggatatggacccggaactgcgtgccttctttgactttaactccatgcatatggagccgtgggatggcccggcgggcatcgtgatgtccgacggtcgttttgccgcctgtaacctcgaccgtaacggtctgcgtccggcgcgctacgtcatcaccaaagataagctcatcacctgcgcctctgaagtcggtatctgggattaccagcctgacgaagtggtcgaaaaaggccgcgtcgggccaggcgaactgatggttatcgacacccgcagtgggcgtattctgcacagcgcagaaaccgatgacgatctgaaaagccgccatccatataaagagtggatggagaaaaacgtccgccgactggtaccgtttgaagatctgcccgatgaagaagtgggtagccgcgaactggacgacgacacgcttgccagctaccagaaacagtttaactacagcgcggaagagctggactccgtaattcgcgtactgggcgaaaacggtcaggaagcggtcggtagcatgggcgatgataccccattcgccgtgctctccagtcagccgcgcattatttacgactacttccgccagcagtttgcccaggtgactaacccgccaatcgacccgctgcgtgaagcgcatgttatgagcctcgccaccagtatcggtcgtgaaatgaacgtcttttgcgaagcagagggccaggcgcaccgtttaagctttaaaagcccgattctgctctactccgatttcaaacagctcacgacgatgaaagaggagcactaccgcgcagatacgctggatatcacctttgacgtcactaaaaccacgctcgaagcgacagtcaaagagctgtgcgacaaagccgaaaaaatggtacgtagcggcaccgtgctgctggtgctctccgaccggaatatcgctaaagatcgcctgccggttccagccccgatggcggttggcgcgatccagacccgtctggtcgatcaaagcctgcgttgcgatgccaacatcatcgtcgaaaccgccagcgcccgcgatccgcaccacttcgccgtgttgctgggcttcggcgcgacggctatttatccataccttgcctatgaaacgctgggccgcctggtagacacccatgcgattgccaaagattatcgtaccgtgatgctcaactaccgtaacggcatcaacaaaggcttgtacaaaatcatgtccaaaatgggcatctccaccatcgcctcttaccgctgcagcaaactgtttgaagcggtcggtctacacgatgatgtagtgggcctgtgcttccagggggcggtcagccgcattggtggagcaagctttgaagacttccagcaggatctgctgaatctgagcaaacgtgcctggctggcgcgtaagcccatcagccagggcggtctgctgaaatacgtccacggcggcgaataccacgcctacaacccggacgtggtgcgcacgctgcaacaagcggtacaaagcggcgagtacagcgactatcaggaatacgcgaagctggttaatgagcgtccggcaaccacgctgcgcgatctgctggcaattacgccgggtgaaaacgcggtcaacattgctgatgttgaaccggcaagcgaactgtttaaacgctttgataccgccgcgatgtctatcggcgcgttaagcccggaagcccacgaggcgctggcggaagcgatgaacagcatcggcggtaatagcaactccggtgaaggcggcgaagacccggcgcgctacggcaccaacaaagtgagccgcatcaagcaggtggcttccggtcgctttggggttactccggcgtatctggtcaatgccgacgtcattcagattaaagtcgcccagggcgcgaagccaggcgaaggcggtcagttgccgggtgataaagtcacgccttacatcgccaaactgcgctatagcgtgcccggagtgacgctgatctccccgccgccgcaccacgatatctactctatcgaggacttagcgcagctcattttcgacctcaagcaggttaacccgaaagcgatgatctccgtgaagctggtttccgaaccgggagtaggcaccatcgcgactggcgtggcaaaagcttatgcggacttgatcaccatcgcaggctatgacggcggcaccggcgcaagtccgcttagtagcgtgaaatacgcaggctgtccgtgggagctggggcttgttgaaacccagcaggcgctggttgctaacggcttgcgtcacaagatccgtttgcaggtcgatggcggcctgaaaacgggtgtcgatatcatcaaggcggcgattctcggcgcagaaagcttcggcttcggcactggcccgatggtggcgctcggctgtaaatatctacgtatttgccatctgaacaactgcgcaacgggtgtagcaactcaggatgacaaactgcgtaagaaccactatcacggcctgccattcaaggtgacgaattactttgagtttatcgcccgtgaaacccgcgagctgatggcacagcttggcgtaacacgtctggtggatctgattggtcgcaccgacctgctgaaagagctggacggtttcaccgccaaacagcagaagctggcgctgagcaagctgctggagactgccgaaccgcatccaggtaaggcactctactgcaccgaaaacaacccgccgtttgataacggcctgctgaacgcgcagttgctgcaacaggcgaaaccgtttgtcgatgagcgccagagcaaaaccttctggttcgatattcgcaacaccgaccgttctgtcggcgcgagccttagtggctatatcgcccagacgcacggcgatcaggggctggcagccgatcctatcaaagcgtacttcaacggcaccgcaggccagagcttcggcgtgtggaacgcgggcggcgtggaactgtacctgaccggtgatgccaacgactatgtcggtaaaggcatggcgggcggcttaatcgccattcgtcctccggttggttccgccttccgcagccatgaagcaagcattatcggcaacacctgcctgtatggcgcgaccggtggtcgtctgtatgccgcaggccgcgcgggtgaacgtttcggcgtgcgtaactccggtgctatcaccgtggtagaaggcattggcgacaacggttgtgaatatatgacgggtggtatcgtctgcattctgggtaaaaccggcgttaacttcggtgcgggcatgaccggcggtttcgcttacgttctcgatgaaagcggcgatttccgcaaacgcgttaacccggaactggtcgaggtcttaagcgttgacgctctggcgatccatgaagagcatctgcgtggtcttatcaccgagcatgtgcagcataccggctctcagcgcggtgaagagattctggcgaactggagtaccttcgccactaaatttgcgctggttaaaccgaagtccagtgatgtaaaagcactgctgggtcaccgtagtcgtagcgcagctgagttgcgcgtgcaggcgcagtaaggggtagcaacaatgagtcagaatgtttatcaatttatcgacctgcagcgcgttgatccgccaaagaaaccgctgaagatccgcaaaattgagtttgttgaaatttacgagccgttttccgaaggccaggccaaagcgcaggctgaccgctgcctgagctgcggcaacccatactgcgagtggaaatgcccggtacacaactacatcccgaactggctgaagctcgccaacgaggggcgtatttttgaagcggcggaactgagccaccagaccaacaccctgccggaagtttgcggacgagtctgcccgcaagaccgtctgtgcgaaggttcctgcactctgaacgatgagtttggcgcggtgaccatcggcaacattgagcgctatatcaacgataaagcgttcgagatgggctggcgtccggatatgtctggtgtgaaacagaccggtaaaaaagtggcgattatcggcgcaggcccggcaggtctggcgtgtgcggatgtcctgacgcgtaacggcgtaaaagccgttgtcttcgaccgtcatccagaaattggcgggctgctgaccttcggtattccggccttcaagctggaaaaagaggtaatgacgcgtcgccgtgaaatcttcaccggcatgggtattgaattcaaactcaataccgaagtgggccgcgacgtacagctggacgatctgctgagtgattacgatgccgtgttccttggcgtcgggacttatcagagtatgcgcggcgggctggaaaacgaagacgccgatggcgtgtacgcagcgctgccgttcctcatcgccaacaccaaacagttaatgggctttggtgaaacccgcgacgaaccgttcgtcagcatggaaggcaaacgcgtggtggtccttggcggtggcgacactgcgatggactgcgtgcgtacgtccgtgcgccagggagcgaagcacgttacctgtgcctatcgtcgtgatgaagagaacatgccgggttcccgccgcgaagtgaaaaacgcgcgggaagaaggcgtagagttcaaattcaacgtccagccgctgggtattgaagtgaacggtaacggcaaagtcagcggcgtaaaaatggtgcgtaccgaaatgggcgaaccggacgccaaaggccgtcgccgcgcggagatcgttgcaggttccgaacatatcgttccggcagatgcggtgatcatggcgtttggtttccgtccacacaacatggaatggctggcaaaacacagcgtcgagctggatagtcaaggccgcatcatcgccccggaaggcagcgacaacgccttccagaccagcaacccgaaaatctttgctggcggcgatatcgtccgtggttccgatctggtggtgaccgctattgccgaaggtcgtaaggcggcagacggtattatgaactggctggaagtttaagcgaggtaacaatgaattcgccagactgtgtctggcgaatcaaattactgacgaagtgcgcgttgttttctggcaaatgcggcatgagcgtttgacctttcctataatagggataattttcaataaattgtgctttgttcaccaagtctgatgagtgaagcacatcaagcaatttctcatttacaatccgtctcaattacttgttaacacctctgacaataccgattctgcaagctattcagtcttttcattccatgtaaattgtctcgatattaatatacaaaatatgaatataaaaaaccaatatattatccttaattatctatatattttcctatttttcagcgcaaacattcatgtaatgaataattatcaccacaaaccacctcaccagcaccttattattcacatgatcgtaactataaaattcattaaataaatacatcccagcaagttggctatttctgaacgagttatttatttacattcacaaacagatatatatactgcttcagctttttattttaaaaaataaatttgttattaaggatatgttcatatgtttttcaaaaagaacctcacaacagctgctatttgtgcagcactttctgttgcagcattcagtgccatggcaacagatagtactgatacagaattaactatcatcggcgagtatacccctggtgcatgtaccccagttgttacgggcggcggcattgttgactatgggaaacatcataacagtgcgctgaatccgaccggtaaaagtaataaactggttcaactgggccgcaaaaacagcacattaaatataacctgcacagcaccaacgctaattgctgtaacctccaaggataaccgtcagagcaccattgtagcgttaaacgacacatcctatattgaaaaagcttatgatactctcgtagatatgaagggaacgaaaaacgcctttggtttaggttctgcgcctaatggacaaaaaattggcgctgcatccattggtattgacaggtctaatggtgggattcacgcggcggacgatacaggtgaaattcctgtcgacctgattcaaactgaccactggagtgcagcgacccccacatggaaagccagttctaatggcgcattctgcagcctgacaagttgcagtgcaatcgagcgcggttattctgttgcaaaaacaggggaactgacacctgttgctattacagcggtcaccttcccgttactgattgatgctgcggtaaatgacaatactattcttggttctgatgaaacgatcaaactggatggtaacgtcactatcagcgttcagtatttataagaacttgtaatacagtttttatttttacgcattaaccagttagctataactcggacagattatgccctatgacatggtctgtcttaatcaatctcatcgcaaacagtgcataacatatattaacaatatgtttctgcgttatttatcattattacaggagttttaatttaaatgctcagacacattacattcactgtatttataacaacatcaatgaatactaacaatgccggacaggagtactatcaggcattcgttttatacgatcggttaatgtttcaggaaagctcttcgcatatcttggggaaagtaaatgtaatacgctgttcttaattgttcagtgctcaccccccagagtatagctcattccattattcaacttagctccatataaagggacagataatggaaagcctcagtgaaggaaccacagcaggctaccagcaaatccacgacggtattattcatctggtcgatagcgcccggacggaaacggtacgtagcgttaacgcgttaatgaccgcgacgtaccaggaaattggccgacgaattgtcgaatttgaacaaggtggcgaggccagggctgcgtatggtgcgcagctaatcaagcgactaagtaaggatttatgtctaaggtataagcgtgggttctctgcaaaaaacttacgccaaatgaggcttttttacctcttttttcaacatgttgaaattcaccagacaatgtctggcgaattaacaccattgggaattccgcagacaccgtctgcagaattcccaagcgcaaagatttggcagacgctgtctgccaaatctttccccttgcccaggtccacctacgtccgtttactttccgttaaaaacgctgacgcccgcagcttttatgaaaaagagacgctccgctgtggctggtctgttcgccagctagagcggcaaattgcgacccagttttatgagcggacactactgagtcatgacaaaagtgccatgctgcaacaacacgctcctgccgagacgcatattcttccgcaacaggcgatacgcgatccctttgtgctcgaatttctggaattgaaagatgaatatagtgaatccgattttgaggaggcgctgatcaaccacctgatggatttcatgctggaacttggggatgattttgcctttgttggtcggcagcgaaggttacgcattgatgacaactggtttcgtgtcgatctgctgtttttccaccgccgtttacgctgcctgctaatcgtcgatctaaaagtgggcaaattcagctatagcgatgccggacagatgaatatgtatctcaactacgccaaagagcactggacgctaccggatgaaaatccgcccatcggtctggttctctgtgcagagaaaggagccggagaagcgcattatgctctggcaggtttgcctaacaccgttctggcaagcgaatataagatgcaactacctgatgagaaacgactcgcagatgaactcgttcgaacacaggcggtgctagaggaaggctatagacgccgttaatttcagcggtttcgaattctgcagacagtgtctgcagaatctttaaaacgaactaagttttaagccattaaatcagccttaaccttcaccacaacctttttaatctctccaggctcgccgacaacgcatcctggtttatgcggttcacctggcataaacacggcgaacattcccggttttaagatgatggcttgctcgttatcaatggtgctgcaaagctgataatcatcctcatggtggaactcttcacactgacgcgcagtgcctgccatgccaaacagaatccgttcctcaccgtttaataacagctggatatcaatgtattgctcgtgcaattccgcttttttctcgacggggctttgagtgttaaacgtcatgacattcataaagatattgtcgccctgtaattcgtaacgacccggcgctttttcttgcggtctggcagctaatgccagcgttaacgcgtcctgtaacgcaggatgtaacccagcagacggtaaactctgtacttcacccatcatcataatttttctccctgggccaacagcgcagccccaagtaaacctgcatcatggcggtaatgcgccgccagtaaatcaacatgaaatgccgctggctcctgcgccagatacgtttccaccagcgccagatacccttctgccagaccaacgctgccaccgaccaccacgcactggcaatcagttgtggctttaatatcagcgatcagccttgcaagcgtacgtgcggagcggtgaatcagctgctgcgcctgctcgtcaccctgcccggcgcgcgtgaaaatagttttcgcatccgcgccagccaactccccctgcgctgccgctgcaatgccgcgaccagaagcaatcgcttccacgcaacctgtgcgtccacagccgcagactgggccgtgtggatcggcaagcgtatgcccgatatgccccgccagaccgccagggccggtaagcagtttgcagccgctcactacaccgccgccaacgccggtggaaacggtgataaagaccatatcggttatatcgccatccagcgcctgaaactccgcccatgctgcggcctgcgcgtcgttaatggcaatggtcggcaaattggtaagttgttccagcgttttgactaacggaaagtgtagcaatccaccaagattatgcggattaagcgccagcaagctgccgtcacggattatcccggtgctagcgatggcaacccgctgcgcatgagcttgcaacggagagactaatgcggataaggcatcacgcaaggcttctggtgtctggctggctggcgtaggaagttcacgacgatcgcggatctgcccgtcagcgccaatcagcgcggcggcaagtttagtaccgccgatatcaatcgccagtgtggtcatagcaccgcctttttcatcgctgtgttgtaccactgacaaatgtgctcaagacgcgtgattgcagaaccgaccgtcaccgcccacgcgccgtggcgcatcgcatccgccgcctgagcaggcgtgttgtaacgcccttcggcaatcacccgacatccggcgtcgctcaacgttttcaccagcgccagatccggctcttctggcgtttcaggcgtggtatagccagaaagcgtagtgccaataatttcggctcccagcttttggcatgccaggccgtcttccggcgtactgcagtcggtcatcgccagtaaaccgtgatggtgaatacgtgccagcagcgtttcaacaggcaccggacgcgggcggtcggtgccgtcaatggcgataatgtccgcgcccgcctgcgccagcgcatcaacatcttcaatataggccgtgatgcgtaccggagaatcctccagatcgcgtttcacaattccaataatcggcacgctcaccaccgcacgcgtggcttgcagatttgccacaccttcaatgcgaatggcaaccgcgcccgcctgttctgccgctaatgccatggcggcgacgatttcgggtttatcgagcgggctgtccggaaccggctggcaggagacaatcaggccaccgttagcagcgattttttgatccagttgtgcaagtaagctcatacatcttcccttagcgaaaggcccggtacatagaccgggcaacaggattaacttttggttttgactaaatcgtttttggcgctgccaaacggcacggcaccgctgaatggtttaccgtcgatagcgtcatgagtacgcaacgcttccgggcgcaaccaacgctgaacgcgagaaggcatatccagcccaatcagcaggatcaccacgaacgtcagactgaagctgaggcttgccagcgcagtacccagatccagacgttgagcgatcaacgcgccgatgattggggccagtgcaccgcccaatgcgccaacgttgtaggtaaagcccaggcccgctgcacgctggtcggtatcgaaataaccgccaatcagttttggtaagatcccggcgatcccttgtccaagcatttgctggaagaacagtaacagaccgagcacccagacgtttgcgccgccaatcgcaaataccggaataatcagcagctggctggccagcaggctacaaacgtacgctttgcgggttcccagccagtcaccgaggaagccacctacgcagcatcccaccgccgcgccaaagccactaaagaacagcacattggctacagtatgcgggttataagccagatcggttttcagatacgttggcagcagcgcctgaatcggccaactgtagaggaaagcaaacaacacgaccaccatcagcattacgcccgttggccagcgtttgcctgcactctgcaccataaagctgataaagattgcggcgcataacagcccaagaacagcgacgatcgcggcattttgcaggttaccggcgaagcagaaccacagcgcagtagccgccgccagtgtcattacgatattggcaatgcgatgttcaccacggtagagaatatccaccattgtgcgtactggtgctttacctgcgtgtttctctttccagtcttccgcttccgggatgtttttacgcagccagagagcaaagatgattggcaaaatgccgataaagaacagcgcacgccagccccagaccggaaccaccaggctatagacctgagcggcaacgacggcccccacagagaagccactaatcaaaaaaccactggctttgttacgcagatgttttggccagctttcaatgacataggtggcgctggaaccgtattcacccgccatccccatgccgatgaccagacgagcgataaacatggtgatgtagcctggcgcaaagccgcaggccagcgtcccggcgctgaagagaacgatgctggtgaccattgccagacgacgcccgtagcggtcacccatagcgccgagcatcaggccgccgaaccagcgagagataaaggctgcagagatcagacttgccgcctgcaccgtcgtcagcccgaattcaccttgtacttcggtgagtaccagggcgattaaaacgaaatcaaaaccgtcaagcagatatcccaaccaggcagcggaaaatgcgcgccattgtgcacggttgagatggcgataccacgggatattctgggttgtagtactcattgtgagtctcccgcggtgggcgatgcccacacgctttggtatgaaaattgtagggtacagatgcgtttatttcccctcacccggtaggggcgagcgaggggaaacaactcacccgcgctcttgcatcaactgctgggccagcgccttcagttctggcagatatttttcatctaccggtccaaacggtttgcggcacagcggcacagaaacgacatccatataatggaggacagttttcaggccgcggaatacgcccgttttgatcagtaaatcaatgactttattgcattcagtttgcagtttctgcgcggtctggatatcgccttctttcagcgccttaacgatcccctgatagcgccagcccatgatgttgtaggtactgccgataccaccatcagcgcccgccagcagaccagaggcgaagatttcgtcgtaaccgttatagagcacaagatcaggatgttcacgacggatctgctccatctgatagagatcgccagaggtctgtttcagcgcacctacgccaggcaatgtaacaagtgtgttgatctgatccagggtcagttttaccccactcagggctggaatgttgtacaccaccatcggcaaaccatccgcgctatcaataattgcccgatagtgatcgcagtgttcttcaaagctgaaaggatagtagaacggcgtgacggcggagacggcatcgaagccataacgtttagcgcttgccgcaagttgttggctttcggcggtgctgacgcaaccgacgtgggcgatgagtttaatcttacctttcgcctcttcggcgacgatttccagtacctgttcacgctcggaaaggctttgtacaaaggcctcgccggtgctaccacccacgtataaaccgtcgatgccctgctgaatattgaactgaaccaggcgacgcagactcgctttatccagtgcttgttgttggtcaaaaggagtcaggagtgcagccattacgccacgtaaattcgttgccataaatacctctgaagtgatgcttgtctgataaacgatatacctttatacctgttataccagatcaattaagcaacaccccatacagaaagcttataatgcgatctgcttcactaaagtggcattatttctttttgttggtggtctgaccgaaagcgtgccaggtagcagagacgctgttgagatggctttgcaacgcacgatcggcttcgtcaggatcatgacggcggatcgcatcaacgatcgcaatatgctgttgataactaacgttgttatgttcgtgcagtgcctgatcggtaaccgttgggcgtgcggcaataagccagtcgagcagggcaacgtggatcgccatgaagattgggttaccggggatctccgccagcacgcggtggaaatcaacgtcactacgaatgaatgccgcgttgttatccaggctctgactgttgatttccagtgcttttgccagcaaatcgatttgctcatcggtggcatgttcagccgcatagcgcaccagactggattcaaagaacagacgtaattgttcgaaatgggcaatcccaccgggatgagaaaggaaatctttcgccatgccggaaagctcaccgatgatagtgtccgcagaaggacggctgacgcgagcgcgttcgccgttgtttatttgcaccagacctttgcgttttaacgctgccagcgcttcacgcacgctaggacgcccgacgttaaagaacgccatcagttcgcgttcagacggtaattgttcaccttcgccaaattcacgacggcggatcatctgttccagctcttcttccaccatttcggagagttttttacgcgccagcgggcggctacgcaagttgcgaccaattgcaggactagaatcttcggtttggctatcaaatgcgttcataaggcccattctgtaaggtcagtgtgattaacatcatcagtgacatcctatcacaggattgaaagtaggggaaaatggcagggttttctctttgtgcctcatcattaccataattaacggaataattaactattgcgaaaaattaatgtaacgcagataaaaacatcccgtttgaattatttataagactattcacgagcattatgaatattatgaatgtgttcttacaaaataatcataagcgcatattttttaatgaaaaatcacctcacctacaattaaaaacacgacatccgcaccataaatagccttgcaaaaaatataacatcgttgttttcaatctgccgtttatgggattgaccgttttcttttgacacggagttcaacaatgttcggcataattatatctgtcatcgtattaattacgatgggctatttgatcctgaaaaactacaaacctcaggtggtgctggctgccgcaggtatcttcctgatgatgtgcggtgtctggttagggttcggtggtgtactcgatcccaccaaaagcagcggctacttgatcgtcgatatttataatgaaatcctgcgcatgctgtccaaccgcattgccggattggggctgagcattatggcggtgggcggttatgcccgctacatggagcgcataggggccagtcgcgcgatggtgagcttgttaagccgcccgttaaaactcattcgcagcccgtatattattctgagcgcaacttacgtcatcggccaaatcatggcgcagtttattaccagcgcctccggtctgggtatgttgctgatggtcaccttatttccgacgctggtgagtctgggagtaagtcgtctctctgcggtggcagttatcgcaaccacgatgtccattgagtgggggattctggaaacgaactccatttttgctgcccaggtagcgggaatgaaaattgccacatacttcttccactaccagcttccggtcgcctcttgcgtcattatcagcgtggcgatctcccactttttcgtgcaacgcgcttttgacaaaaaagataaaaatatcaatcacgaacaggcagagcaaaaagctctcgataatgtcccgccgctctattacgccattttacctgtgatgccgttaatcctgatgctcggcagcctgttcctcgcccacgtcgggctgatgcagagtgaactgcatctggtggtggtgatgttactgagtttgactgtgacgatgtttgttgagttcttccgcaagcataacttgcgcgaaacaatggacgatgtgcaggcgttttttgacggcatgggtacgcagtttgccaacgtggtaacgctggtggtcgcgggtgaaatatttgcgaaaggcttaacgacgattggcactgtcgatgcggttatcaggggggcggagcattctggtctgggcggtattggcgtgatgattattatggcgctggtcattgccatttgtgccattgtgatgggctctggcaatgcgccgtttatgagttttgccagtcttattccgaatatcgcagccggactacatgtaccagcggttgtaatgattatgccgatgcattttgccacgacgctagcgcgcgcggttagcccgattactgcggtggtggtcgttacgagtggaattgcaggcgttagcccttttgcggtggtgaagcggacagcgatccccatggcagtcggtttcgtggtgaatatgattgccacaatcacgctattttattaagtcattaaaaagacaaaacaggccgcctgggcctgttttgtattacttcacaacgcgtaatgccggtcgaccaccgcgtggtggctgcggaggttcatcgtcaggatgagtgtcatcatcgtgatctggcttgtcgccatcaataacgctcataacggtttcgttgtctgcgcttgcctcttcatcattcatgatgctggtatcttcatcgtaggcagcttcaggctcaaacatcgtgcctgcgccattttcacgggcgtagatagccagcacggcagccagcggcacagaaacctgacgcggaatgccaccaaagcgcgcgttaaagcgcacctcatcattcgccagttccagattgccgacagcacgcggcgcaatgttgagtacgatttgcccgtcacgcgcatattccataggaacctgcacgccagggagcgtcacatccaccaccaggtgcggcgtgagctggttatccagcaaccactcatagaatgcacgcagcagatagggacgacgtggtgttagctgactcaaatccatacagattaactccggcccagacgcatttcacgttctgcttcagttaaagaagcaaggaaagagtcacgctcaaagacgcgggtcatatagcctttcagctctttcgcacccgggccgctgaactcgatgcccagttgcggcagacgccacagcagcggagcaagatagcaatcgaccaggctgaactcatcgctcaggaagtacggcttctgaccgaagaccggcgcaatcgccagcagttcttcgcgcagttgcttacgtgcggcatctgcttcagaagcactaccgttgatgatggtgttcatcagcgtgtaccagtctttttcgatgcgatgcatgtacagacggctttcaccgcgagctaccgggtaaacaggcatcagtggcggatgcgggaaacgctcatccagatattccataatgatgcgagattcccacagggtcagctcacgatccaccagggtcggaacgctctgattcgggttgaggtcaatcagatcctgaggcggattgtccttttccacgtgttcgatctcgaaacttacacctttctcagccagcacaatgcggacctgatggctatagatgtcagtaggaccggaaaacagcgtcattacgctacgtttgttggcagcgacagccatgaaaacctccaggtatagtcagaatttttactgctaccagccaccaggtggccagtcagaagttgtgttacccaataaggaacgactctctttgttcgaaaatcaaacaaaaaatgagcaatacccgacatttgggcagaaaattggatgatagtttaccagattttgcgaccattgtggtgagtcgatgccggaaatggggaaaaagagatgcgctttagtctgaaatagttgacttagtcccttattggcgatgtggtttttgttttacctgtctgtcaggtggcagcaaaaagcaactttccagtttttacgctgattcagattttagctataaaaaaacccgccgaagcgggttttttcgaaaattgttttctgccggagcagaagccaattaacgtttggagaactgcggacgacgacgtgctttacgcagaccgactttcttacgttcaacctgacgagcgtcacgagtaacgaagccagctttacgcagttcagaacgcagggactcgtcgtattccatcagagcgcgggtgataccgtgacggatcgcaccagcctgaccagagataccaccacctttaacggtgatgtacaggtccagtttctcaaccatgtcgaccagttccagcggctgacgaactaccatgcgggcagtttcacgaccgaagtactgttccagagaacgttggttgattacgattttaccgttgcccggtttgatgaaaacgcgagctgcggaacttttgcggcgaccagtgccgtagtattgattttcagccattgcctataatcccgattagatgtcaagaacttgcggttgctgtgccgcgtggttgtgctcgttacccgcgtaaactttcagtttacggaacatagcacgacccagcgggccttttggcaacatgcctttaaccgcgatttcaatcacacgctcaggacggcgagcaatcatctcttcaaaggtcgcttgtttgataccaccgatgtggccggtgtggtgatagtacactttgtcagtacgcttgttgccggttacagcaactttgtcagcgttcagaacgatgatgtaatcaccggtatctacgtgcggagtgtattccgctttgtgcttaccgcgcaggcgacgagccagttcagtagccagacggcccagagttttaccggtcgcgtcaacaacataccagtcgcgttttacggtttctggtttagctgtaaaagttttcattaaaagcttacccaataaatagttacacgttggtgaacacccaaacgtcttcaattgttgaggttcacacgacaaagtccggcaaacctaccccttcgaatagcctatgccagcacacaaaaagttttgggaaaaaaactttcttgtaacgtggggtcgcaggattatagagaagtcggggtcaaagatcgacccctttttgtgatttgtgacaggttttaacccgccaaatgctcgcgcttcagatactcttcgctttgcatctcttgcagacgactcaggcaacgctggaactcaaacttcagccgatcgccctgataaatttcatacagcggcacttctgcactcaccactaatttgacatggcgctcgtaaaactcatccaccagcgcaataaagcgccgcgcttcgctctccatcaaccgcgtcataactggtacatcaaacaacatgaccgtatgaaagagacgactgagcgcaatatagtcatgctgactgcgggcgtcgacgcacagcgtagtaaaagagaccgccagcgtctggttctcgacgcccattgttgctaatggccgatggttgatttctaacgtcggactattttctcgtttcccccccgccagcgccaaccatagtttatccatttgcgcccgggtttcatcgtgaagtgggctaagccacagatgcgcctgagtgagtgtacgcagacgataatcaacaccagcgtccacgttcattacatcacaatgctgtttaatggcatcgattgcaggcagaaaacgcgcacgttgcaggccatttcgataaagttcatccggcggaatattactcgtcgctaccagggtaataccgcgagcgaacagggctttcatcagaccgccaagtagcatggcatcggtaatatcagaaacaaaaaattcgtcaaaacagagcacgtcagtttcggctttaaagcgatcggcaataatttccagcggatcggtctgcccctgtaaggcagttagctcttcatgcacccgcagcataaaacggtgaaagtgcaggcgctgtttccgctctcccggcaggctttgatagaaaaggtccatcagccaggttttcccgcgtcctacaccgccccacatatataagccacgcactggcgtatgctttgtgtcttcgcgtttaccccacagcttaccgacccgcgccattagcccactcgtcctgggggctggtggcgtgctattgatgagttcctgataaataatttccaggcggctgacggcctctttttgaacgtcgtcgggttgatggctgccttcattaagcgccttcaggtattggcttgttggggtaacgctttgcatgatcttattgttattccttgaataatcggtgcgccgttgttcacggttgacgaaaaaaaggccgttctacactacgcgatatgcagtcgggattccacttctgtggaattaacggttatagtggcataatcagccgcaggcatggagcctgaagccaacaccctacggaaacaaaagacaacgggagatgttcatgacctgggaatatgcgctaattgggttagtcgtcggcatcattattggtgctgtggccatgcgttttggtaatcgtaaactacgccagcaacaggcgttgcagtacgaactggaaaagaataaagctgaactggacgagtatcgcgaagagctggttagccactttgcccgcagcgcggaattactggataccatggcgcacgactatcgccagctgtatcagcacatggcaaaaagctccagcagcctgctgccggaactgtctgctgaagcaaacccgttccgtaatcgtctggcagagtctgaagccagcaacgatcaggcaccggtgcagatgcctcgcgactattctgaaggcgcatccggcctgctgcgtactggcgcgaagcgcgactaatttatttttcgggcgcagccattgcgccctcctcttctctccctccccgactatcatttaatctggtgtctcattgttagccgtctgaaaattcaataacatcaaactgttttgaatctcttttcttatcattcaggtacgagagcaggaataatgaaaaaacaaacccagctgttgagtgcattagcgttaagtgtcgggttaactctcagcgcgagttttcaggccgtcgcgagcattccaggccaggttgccgatcaggcccctctccccagtctggctccaatgctggaaaaagtgcttccggcagtggtgagcgtacgggtggaaggaacggccagtcagggacagaaaatcccggaagaattcaaaaagttttttggtgatgatttaccggatcaacctgcacaacccttcgaaggtttaggctccggtgtcatcatcaacgccagtaaaggctatgtgctgaccaacaaccatgtgattaatcaggcacagaaaatcagtattcagctcaatgatgggcgcgagtttgatgcaaaactgattggtagcgatgaccagagcgatatcgccctgttacaaattcaaaacccgagcaaattaacgcaaatcgctattgccgactccgataaattgcgcgtcggtgattttgccgtagcggtcggtaacccatttggccttgggcaaaccgccacctctggcattgtttccgcattaggccgcagcgggttgaatcttgaaggtctggaaaactttatccagacagatgcttccattaaccgcggtaactccggcggtgcactattaaaccttaacggtgagttaattggcatcaacactgcaatccttgcgcctggcggcgggagcgtcgggattggatttgccatccccagtaatatggcgcgaacactggcgcagcagcttatcgactttggtgaaatcaaacgcggtttgttaggcatcaaaggcaccgagatgagtgccgatatcgccaaagccttcaaccttgacgtgcagcgtggcgcgtttgtcagcgaagtgttgccaggttctggcagcgcaaaagcgggcgtcaaagcgggcgatattattaccagcctcaacggcaaaccgctgaatagctttgctgagttgcgctctcgtatcgcgaccaccgagccgggcacgaaagtgaagcttggcctgctgcgtaacggcaaaccactggaagtagaagtgacgctcgataccagcacctctagcagcgccagcgctgaaatgatcacgccagcgctggaaggtgcaacgttgagcgatggtcagctaaaagatggcggcaaaggtattaaaatcgatgaagttgtcaaaggaagcccagctgctcaggctggcttgcaaaaagacgatgtgatcattggcgtcaaccgcgatcgggtgaacagcattgctgaaatgcgtaaagtgctggcggcaaaaccggccatcatcgccctgcaaattgtacgcggcaatgaaagcatctatctgctgatgcgttaatgtcgtaaaccgggcatcaggcttacgtgtgatgtccggttaactcgtggtatgctgctgccgttcccttttttaatgacgcctccatcatgtttgtgaagctcttacgttccgttgcgattggattaattgtcggcgctattctgctggttgccatgcctagcctgcgcagccttaacccgctttccactccgcaatttgacagtaccgatgagacgcctgccagctataatctggcggttcgccgcgccgcgccagcggtggttaacgtttacaaccgtggtttgaacaccaactctcacaaccagcttgagatccgcaccctgggatccggtgtaatcatggatcaacgcggttatatcatcaccaataaacacgtcatcaacgacgccgatcagatcatcgtcgccttacaggatggacgtgtatttgaagcattgctggtgggatctgactctctaaccgatctggcggtacttaaaattaatgccactggcggtttacctaccattccaattaatgcacgtcgcgtaccgcacattggcgacgtagtactggcgatcggtaacccgtacaacctcgggcagaccattacccaggggattattagtgccacgggtcgaatcggtctgaacccgaccgggcggcaaaacttcctccaaaccgatgcttccattaaccacggtaactctggcggcgcgctggtgaacagcctgggcgaactgatgggcattaatacgctgagctttgataagagtaacgatggcgaaacgccggaaggtatcggctttgcgattcctttccagttagcaaccaaaattatggataagctgatccgcgatggtcgcgtgatccgcggctacattggtatcggcggacgtgagatcgcaccactgcacgcgcagggcggtggtatagatcaactgcaagggatcgtggttaatgaagtgagtcctgacggcccggcggcgaatgcgggtattcaggtcaacgatctgattattagcgtggataacaaaccggccatctctgctctggagacgatggatcaggtggcggaaattcgccctggtagcgtgatccctgtagtagtgatgcgtgatgataagcagttaacgctgcaggtcaccattcaggaatatccggcaaccaattaagtcgtgcgctcaaaacaaaaaaccggagtctgtgctccggttttttattatccgctaatcaattacttattaacgaactcttcgcccagggcgatatctttcttcagcgtatccagcataccttccagcgcgttctgttcaaatgcgctcagggtaccgatagatttacgctcttccacgccgtttttacccagcagcagcggttgagagaagaaacgggcgtactgaccgtcgccttcaacgtaggcacattcgacaacgccttgttcgccctgcagtgcacgaaccagagacagaccaaaacgtgcagctgcctggcccatagacagggttgcagacccgccaccggccttcgcttcaaccacttcagtacccgcgttctggatgcgtttggtcagatcagccacttcctgctcggtaaaactaacgccaggaacctgactcagcagcggcagaatggtaacaccagagtgaccgccaataaccggcacttcaacttcgcctggctgtttgcctttcagttccgcaacaaaggtgttggaacgaatgatatccagcgtggtaacgccgaacagtttgtttttgtcataaacaccggcttttttcagcacttcagcagcaattgcaactgtggtgttaaccgggttagtgataataccaatgcacgctttcgggcaggttttcgcaacttgctgtaccaggtttttcacgatgccggcgttaacgttaaacaggtcggaacgatccatacccggtttacgcgctacgcctgcagagataagaacgacatctgcgccttccagcgccggagtcgcatcttcaccagaaaaacctttgattttcacagcagtagggatatggctcagatcgacagccacaccgggagtcactggagcgatatcatacagagagagttcactaccactaggcagttgggtttttaacagtagtgcaagcgcctggccaataccgccagcagcgccgaggactgcgactttcatcctaaactccttattatattgataaactaagatatgttgctccgctgccgcgaccttaatccacaaaattgccgtttacaatgaccacatctcaagaatgtgtagtcacgcaagtttagcgtttatgcatttaattgccgtaatcaggaacctaacttacgtaattaacagtcgcttatgcattagcgcaacattccaacaggtggtgacaatataccctaccgttcagccaaaacaacatcaatttgataacaattaatttacttttaagcagaatttgcatgccgtgacgcaggcatgtttctcaataacgaaatttgataaaatcccgctctttcataacattatttcagccttcttcagggctgactgtttgcataaaaattcatctgtatgcacaataatgttgtatcaaccaccatatcgggtgacttatgcgaagcagcgctaagcaagaagaactagttaaagcatttaaagcattacttaaagaagagaaatttagctcccagggcgaaatcgtcgccgcgttgcaggagcaaggctttgacaatattaatcagtctaaagtcagccggatgttgaccaagtttggtgctgtacgtacacgcaatgccaaaatggaaatggtttactgcctgccagctgaactgggtgtaccaaccacctccagtccattgaagaatctggtgctggatatcgactacaacgatgcagttgtcgtgattcataccagccctggcgcggcgcagttaattgctcgcctgctggacagtctgggcaaagcagaaggtattctgggcaccatcgctggcgatgacaccatctttaccacccctgctaacggtttcacagtcaaagacctgtacgaagcgattttagagctgttcgaccaggagctttaatctctgccccgtcgtttctgacggcggggaaaatgttgcttatccctctcaaccccctgctttcccctgcgattaatttaacgaatagtgcgttttactgcgacatgtcattcacacaatgaatacataaggtaaaaaaagcacattatgcaaaattcattatctaattgaaaaaactagaattaacgataaataaccgtatttttaattcttttttgttattaaaattcacatttttaacacttagtatcaactgaaacagttagcgcggtattaattagctcaataattagtgtatacttgattttgtgatatgggtcacgaaacaaaggcccagctaaaagattatgtcgaggtaaaaatcatgaaaatcaaaaccactgttgctgcattaagcgtactttctgttctctctttcggtgcattcgctgccgactccattgatgctgcacaagcacaaaatcgtgaagcaatcgggaccgtatccgtaagtggtgtggcgtctagcccaatggatatgcgtgaaatgctgaacaaaaaagcggaagagaaaggcgcaacggcctaccagattactgaagctcgtagcggtgacacctggcacgctacggctgaactgtacaaataaaccctcatcgtcttgtccgacgatattgcccccggttcgggggcttttttttgcgttaatgacgaacattaaaacgcaaatgcccttccagctcttcctctgcctcatcaaacagcaatattaacgcgccaaaacggcgacgcgttttctctcccagatgaacaaattcaatctcaagtggtagcggcaggacatcgttcattaacacatcccatagactgtcgagatcgcgtaccttatctttcgccagaccaaaggtttggctaaagtcacgataaaaatcctcctgactctcaatctcatcaaaatcaaaggtataaatattcatctgttgccaccgtcacgtttcgcggcgagttctgccgtgcatcgctaagtatagccatgaaaaaaccgacgcttttggcgtcggttttgacttaactatcggtcaacgcatgttgatacttatggagcatccccgccagccgatttaccggttccgtcacctgcggtggcgcttgccagatgcgtagcttttcctggtagatttccagttcttccagcaactggccaaagtaccgacgacgtttatcatcgctacgggcagatatcacatggtctgctgtgcggcgcatttgtcggtgaaacgcgcttaaatcctcgttaaccgggatcggtgcatcacgcaggcgctggtgcgcgataatcatcgtcagcgccaggcgaaatttcggcaaatcccctgggaacttattcatcagcaaaaacagctgctgataaagtgccgggaggtggttctctttacgacgtgccacattggtagtcatcgcggaaacagcggcagaaacaaactgattaagcagtacacgtccggtcctgtcgcggcttttatcccgcaccagcaaaataacggtgaacgcgagcacacagccgacgatttgccctaatgcgctgtcgagaaactgactgaaatggaaagtcatcgggttatccagcacgataatatttatggtgctggccagtgcccccatgctgcccagtcgccgtttctgtacttctataccgaggaagaatcccagcactgccaggctaatgcacagcagcaacatgctctgttgggtattagggataatcaccaaaaagtagagcagccctaacggcagcgcggccagcgtcccgtagataaagtcgatcgccaccatgcgtggattcggcaaacgcattgccagactcgtcactaccgcaatcatcaccattgcaccactgccggaagtccagcccgtccacagccagaaaagcgtgcccagaatgcaggaaagtgtggttcgccagaagttaaccattgcatgatgacgttcggcactctctacttttacttccggttcgccttgcaggatctcttcttcggtggcgttgatttttgtgttactgataacgccgcgcttgagaagctgataacgcgttgccgccgcgacccagctataaatggtgacaggcgtttcccgttccccggtccaggcgataactctccgcaggcgtttgagctgcttgtggacgtcctgcgcggtttctaccggcgtgtcaaaaaattcgcggaaagtatcagtgatcaattccgggcgcgtattctgaataagataagtttcgcaggattgggtaatcagcgtcaggcttagcgtattgatcgcttttaaacgtcgattggcccgcgcccagcgggaagattccatattcaggttgctgcgcatgccttgtagcgccgtggtgcgtcgcaccaggtcgccccaggctttatcgacaacttcaccatcgccatgcttgatacagagttgcattaattgatattgcgcgaccagcaaactttccagctctcgatccacttcttgtttgatgcttcgcggagaaaagagcaaatccgccataatcgcacacacaataccgataacgatctcgctacaacgttcgacggcaaactgcggcgtaagcaatggttccggctgaatggtgatcacaatgatcagcgcggtataaccggccagcccccacgcatagctgttttctattcgtaccaggctggatatccaggtacaaaaaccggcccagatacagcacaccagaatcatcaataatggtgcgcggatcatcgcaatgatgatcaccagtccggcaatacagccaataaatgtgccgatgatgcgcaaaaagccacgatagcgaatagcgccagaatacggttcacctcccgcagcaaaggccgtaccggcggcaacaatcgccgctgtcagtaccgcccagcgtggcgtttccagctggaagtgaaagccaacaaacagcgccagtacaatggcggtcgccagttttaccgcaaagcgaatatgttggttagcaatggagaaaatacccatcgtgattaaccaaactcacgcaggcgatgggccattttacggaagaagctatcctggctttcgtcgcgatcttgtttgccagtgaccaccactgtagcagtggtgcccgcaggccagatgttctcttgctggttgtcgagacgaatacgaaccggaacacgttgcgcaagacgcacccattcaaggttagagtctatagtcgccatccctttgtcgtcacgcgtgctgctggcgttggtgacccctgcggcaacactatcaacagtccctttcagcactttgttactgccaagcggcgtgatctctgcacgataccccggacgcaccccttccagcttagtttcttccatataggccagtacatagaaggagttctgtttcaccagcgcaaccgccgtacttcctcgagtaataaactcaccggtatagacgttgaggttggtcacccagccatctgctggcgcgcggatcaccgtgcgttcaagatccagttttgccagatcgcgggtcgcctgcgctttcgctaactgatgcagaaccgtttgtagtacgttgttggcctggtcgatctcttcgcgagacatcgcctgcacaccgagacggttacgacgtccggcctcctggcgtttctcctgtgccagtacctgataataagcaacatcggcttgcgcttcctcaagcgccttttgatagcgcggctggtcgatggtgaacagtatctgtccttttttcaccagctggttatcatgaacattcacctgggtaatgagtccagaaacgtccggcgcgatcgcaacgacgtcagcgctaaagcgcgcgtcacgcgtccagggggattcggtgtaatagacccaggcattaaaaattgcgatgaaggccagaatgactaatacgaccgtgatggccgtacgggagaattttcttattagtgttttcacttcaacctcaaacgaacagtcggcttatcaaataaaacaagcagcaatagagcgcggtgttgaacaacgccggatgccagacaaagtcgtagatacctgttggcacaagtacccggcgcaccagccagaaaatcgccagacttaaaagcaattcaaaaaatatcggtgggaaggacagcccaaacaccacgataacgggaaacagactcatgttgaccttggttgtaaagagagagcaggcgttattattttcagcatctgtcgccgcagagaagggcatggaaagccgggcgagagcaacattgctgtagattgatatttaatatattagcgtaactgttatgctgttatctatattatgtgatctaaatcacttttaagtcagagtgaataatggaacgactaaaacgcatgagcgtgtttgccaaagtagttgaatttggctcttttaccgccgccgccagacagctacagatgagcgttagctccatcagtcagacggtaagtaaactggaagatgagttgcaggtaaagctgttaaaccgtagcacacgcagcattggcctgaccgaagccggtagaatttactaccagggctgccgtcgtatgcttcatgaagtgcaggatgttcatgagcaactgtatgccttcaataacacccccatcgggacgctacgcattggctgttctagtactatggcacaaaatgttctcgccgggctgacagccaaaatgctgaaagaatacccaggtttgagcgtcaatctggttaccggaattccagcccccgacctgattgccgacggtctggatgtggtgatccgcgtcggcgcgttgcaggattccagcctgttttcccgccgtctgggcgcgatgccaatggtggtgtgcgccgcgaaaagctatctcacacaatacggcataccggaaaaacccgccgatttgagtagtcatagttggcttgaatacagcgtgcggcccgacaatgaatttgaactgatcgcaccggaagggatcagcactcgcctgatcccacaaggaagatttgtgactaatgatccgatgacgctggtgcgctggctgacggcgggtgccgggatcgcctacgtgccgctgatgtgggtgatcaacgagatcaatcgtggggagctggagatcctgctgccgcgttaccagagtgatccacgcccggtttatgcgttatataccgaaaaagataagctgccgctgaaggtacaggtcgtgatcaacagcctgacggattattttgttgaggtcggtaaattgtttcaggagatgcacgggcgcgggaaagagaagtaattcatattgtactgttacgttgtacaaacctgtgccaacgggttcccctcaccctaaccctcaccccaaaggggcgaggggaccgttcgtgcacgtagaaagattaattatccttctgaaaatagtgaaattattacgcagtaccgccaacagtcaggttatcgactttcaacgttggctggcccacgccaaccggcaaactttgcccttctttaccgcagacacccacgccgttatccagtttcaggtcgttgccaaccatgctaatctgctgcatggtttcgataccggaaccaatcaacgttgcgcctttcaccggcttcgttactttaccgttttcaatcagatatgcttcactagtggagaaaacgaatttgccggaggtgatatccacctgaccgccaccaaagttcggtgcatagataccgtactcaacggattcaataatttcctgcggggtgcttttacccggcagcatataggtgttggtcatacgcggcatgggcagatgggcgtaggattcacggcgaccgttgccagtcggcgtcatccccatcaaacgcgcgttgagtttatcctgcatgtagcctttcagaatgccgttctcaatcagcacgttgtactggcctggcgtaccttcgtcatcaatcgccacgctacctcggcgatcgaccatcgtgccatcatcaaccacggtacacagttcactagccaccagctccccgacctgtccactaaatacactagtgccacggcggttgaagtcgccttccagaccgtgaccaaccgcttcatgcaacagcacgcccggccaacctgcgccaagtactaccggcatggtgcccgctggtgcagcaacggcagaaagattgaccagcgccatacgcactgcttcttttgcccatgcatccgcacggacttcgccgtcgagatcggcaaggaagaattcataaccaaaacgaccgccgccgccactggcaccgcgttcgcgtttgccatcttcttcgacgagaacgctcacggaaagacgcaccagcggacggacatccgccgctagcgtgccgtcggtggccgcaaccaaaattaattcatagacaccactgaggctggcagtcacttcctgtacgcgcttgtccgcttcgcgggcaaccttatcgacgcgacgcaggatatccagcttctcttcacggctcatgctttgcagcggatctacgctggtatacaacgggctatgctctaccgcgcccagcgtctgtactttaccatcaccactatcacggacgatggtgcgcgccgcttgcgcactctgttccagcgccagcaggctgatttggtcagcgtaagcaaatccggttttttcaccgctgattgcacgcacaccaacgccctgatcgatgttgtaagaaccatctttaataatgcggtcttctaaaacccaggattcgtgatagctgctctgaaaatagagatcgccataatcaaggcgacgttcggccagttgaccgaggatcgcgaacaagtcctgatgtttcaggccgttcgccgctagcaattgttcacttaccaggttaagactcatcgtttttgctactcgttagttactgcagtagaggattttttacggctgccggatgcggcgtgaacgccctatccagcctacggttatgttccggtttgtaggcctgataagacgcacagcgtcgcatcaggcaacggctgtcggatgcggcgtaaacgccttatccgacctacggttatgttccgtttgtaggcctgataagacgcacagcgtcgcatcaggcaacggctgccggatgcggcgtaaacgccttatccgacctacggttatgttccgtttgtaggcctgataagacgcacagcgtcgcatcaggcaacggctgccggatgcggcgtgaacgccctatccgacctacggttatgttctggctcgttggcctttggcaacgattatcctatgagattggggcaattacgcgccctcgtcaaatcattgcgctttttctttacgcggttggcgcaacacttcgttgatttgcggatcgtccagcggaccgctaatgtgatagcgcaaaatggagactttgctccacagcggccccagcactttactggcggcaaacactgccgcgccaacaatggggttaaccgcaaaagccgcagccacgcccaccgtcgcagaaatctctggtgcgacaaccgcttccatattcaggtcgcgacgtaccagatttacgctccctttcatggcgatatccgcctccaggccatccaccagcgtgtcgtcggtgtgcataacgccgtctttaatccacgcggtgctgcgaatggagtcaaaatagaacccttcgccaaaagtgtctctgaaatcaaaacgcagcttacgcatcagggcatctacgctcaataagcgcagcaattgcccggcatgtccggtattgatttcggtaatttcgcctttacccagttgagtatgaatgatgccattcaacgtcgcttcatctggctgccagggtgctttgcgccagtgtaaatcgtaatccacattaaaactgctctggcgtatgggcgtcgtgacaccaaaaaattctgcggcggcatcaattttctgcccgcgcagttttcctttcaggctggtacgttcattccccggattattaacccattcaccatcggcagtaagccggctgaaaccagtatcaatcagtccattggtcagcgttaacgtatcgccagaaatggtgatatcactgtcaatgcgaccgaatttttgcccccagaaccagcactctgtgcatcgtatttgggcgtccggccagccacggaagttaatgcgctccgttgtcgggaaaggactactcggcgtactatcaccacgagttttcgccacgctcgggttgtaataaagatatttgatattcgccagccacggcgcgttattacgcatcgctagcgtggcgttgatttcacgcccttgcgcttcaaccagggtgccatttgccgtcggttggctaacaatactcaggttattccattgctgatttcccagactcaacataggcgtacgtaacgttatgtgttgtgggaaactcgctgcaccaccgacactctccgcagcgcctttctggaacagggccagccactcggcaccattcatcggcggcatattgagttcaacgccactttgttccggcaacggcgggagcgttttactgtctgccgcccaaatagcacgatcgagcgtcagcttttgaccgagcaaccagcggctattgaaatgattatccgcaccagcctgtccggttaattcaaagctgttgagattgccatcaaccttaacgtttaccgctagtggttcacccgcaggtttggctaacggactaggtaagtgactgctcacattctttagatcgccgttcagctctatgttataggtcgcaccagcatgataaggcagatcaatgcccactttaccatcccacgccacgctgccactcaatgcttcgttcaccgcttcaggcagaacgccggttttcgccggttgccagttaccgttgaggtttaccgctacctggtaggcttttgccccttctttggtggaaaaatccacgttcaacggctgattaaaccagcttgctgtcagtggttcactttgcagatcgctattgataaagctgaatttaccgctcaaatttttcagggtgctgtcgagtggtttgataaacagactgttattacgcagcgtcacttcacctttcgcggttaccagttcgccgttcagcgggatatcaagatgtaagcgagcattcacatcgccgtcgagctggagttcttgcagggtcgcacccagagaatctttcagcggtgtctcatcaaagtaagggccaacggctttacccggacctttaatgtcagcgtcaatcagcagtttttctttactgtagtcagggatcactgcggtaagattactcgcgcgcacgccgcccagattaacgccatcggttttcatccataaaccgtcgttaataaagtccagttcaatatcaaggttagttaatgcaggccagtccggctggaaggcaaacttcgcgttgcgcagcggcaccagcacttcaaactgaccttcgttgtgtttataggggaagagttgcggattgccaccataaaccagcgtcgcgttatccgcttcaccgccctgaatcgcgccacttaagtaatcaaccaggtctttacccatcaagttttccgggaaatagcgccaggcttgactaccatcatcggtactgatgccagccagaatacccagccagggttcatcgttagcaggttgcaggtaacgaaaaccgccgcgcgcatggacggctttggctttaacgtcaatattacgcccatccagctggaaacctttgttattgttcagccagcttatagttgcctggccgtcggcgatttctagtggcgcacggaataccgtttcgtaaggcatctttgcctgcttcatgctcgcggtaagcaaaccattttcaacgctgccggaaagcgtcccggagaagtgttccgcacccggtaataatttccattgcttccaggccagatcgctccagcttgcctgaaaacgggtcttgtctgccgcctgaagcgggatatccagcgccagagtgttaatcttgccgctcggttgtgtggagcgccaaacatcacccagtgcaggactaagtttcgcggccagcgggcgtatgccctccaggcctgccagctccagattactggcgcgaatccggagttcgtcactgcgtttattgtctttgccgccaacgtcctgttccggtatccaggccagcgtcaatgctccgctcggccagggtttgccgtccatcgtgatccgtgtatcgggaatagagaactgccagcccggattttcacgcgtaatatgcgcggtcagattatccacgctcagcgtatgcgtttgcttctcgcccaaccagctggcaccgccctgtttcagccagacgtcaccgccggttacatcgcctttgtcgatcgtcatccagccttcaagggagaactgtgccgtttccagcgcaatattgtcctgcatccatttaccgagccacggcttcaggtcgatgtcatccgcctggagccagacgcgaccattgcttaacaacccctcatcatcgcgcaaatccatgcgcacctgcatcacgccgtgctgtccggtaaggctggagaggcttaccaggccttccgcacggtgtcgacgtggatcgttcagccaggtgagttgtgggatcgccagctcggcgcgctgaccggatggcgtcaggaaactgacttcactgtcgcgaagatcgaaatggtcaaattgacgaagaaacagatcgctgatgtgactggcttccagactgtcatcactaccaccgctggtgataggagtgttggtgcgaaagcgcagctgccagaaagtgaggtcgcgaaactgccagcgcatatgtaacaggctctgccagacatccagcgccagagtaacgcgtttaacgctaaattcgccgccatcttttagttctgcacggatgtcgtgtgcttcaagcgtcgggccaaaattctgccagctggcactgagctgactggcttctaccggcatgccagtcgcggattctattttgttgaggatttccggacgccaggcgtcaagatgcggtaaagcaatacgcaggccgctaaccagcagggcagcgatcacaacgagcgcggctccagtaagcagtaaaatccccggcaatcgcctcacccgtcactccttgtctgctaaaaatgtgactcaaaaaccctttgccggatggcggcccagcatctgtttacatcattacgacgtcaaactgctcctggttatagagcggttcaatttgtactttaacctgtttgccaacgaaaatttccacttccgccaggctgtgactctcttcgcctttcaaggcttcagctactgccggagaagcatagaccaggaaacggtcggagtcgtaagcatggtggacacgaacaatctcgcgcatgatttcatagcataccgtttccacggttttcaccgttccgcgaccgtggcaggttgggcattcgttacacagtacgtgctcaatgctttcgcgggtgcgtttacgcgtcatctccaccagccccagcgcgctaaaaccattaacgctggttttcacccggtctttgctcaacgcctgctccaggctgtgcagcactcggcggcggtgatcttcattattcatatcgatgaaatcaataatgataatcccgcccagattacgcaaccgtaactggcgagcgatagcctgcgtcgcttcaatattggtattgaaaatggtgtcgtccagattgcgatgaccgacaaacgctccggtattgatgtccacggtggtcatcgcttcggtctggtcgataatgagataaccaccggatttcagttctactttgcgttccagcgctcgctggatttcgttttcgacatcaaagagatcgaaaatcggctggcgtcctgtgtaatgctccagcttgcttgtcatctcgggaatgtactcgctggtgaactcaagtaacgcttcgtaagtcaggcgactgtcaacgcgaatgcggtccagttcggcatcggcgaaatcacgcagaacacgctgcgccagcgccagttcgccgtacagctgataacgggtctgcgggcgttttttacgctccataactttggtccagacgcgtttcagataagcggcatcggaggccagttcagcctcgccaaccccttccgctgcggtacggatgataaacccgccctgctcgtcgcaatactctgcgaccacttttttcaggcgttcacgttcactttcgctttcaatacgttgggaaaccccaacgtgagaagcccctggcataaacaccagatagcgagaagggagcgtgatatcggtggtcaggcgcgcacctttagtgccaagcggatctttcaccacctgcaccatcagatcttgcccctgacgaaccagttcgctgatgtcgcgcaccgtgaattgcttttgttcttcacccgccacacattcggtgtgcggcatgatgtcggatgcatgaagaaacgcggctttatccagcccaatatctacaaaagccgcctgcatacccggaagtacacgacttacacgacccttgtagatattgcctactattccgcgtcgcgcctcacgttcaatatgaatttcctgcagaataccgccatcaatatacgccactcgcgtttcgctaggcgttacgtttactaacaattcagccgtcatgtttatcccttttctcacgcagtgcgttaaaattacttaataattcatacgtttcaaccagcggtaagccgactacggcgtgatagctgccatttatcttcctgacaaaacagccacccagcccctgaataccgtatgcacctgctttatctaacggttcatcgctggcgacatagcccgcgatgtcttcgtctgttaacgttctgaaagtcacatcggtgaccaccaggcaatcgagaatgtgctggctgtcggccaacgccactgctgtcatcacctgatgggtctgaccgcttaatttgcgcaacatctgcgccgcatgctctgcgtcgcgcggtttctccagcacttctccgttcaggataacgatagtatccgcacccagcaccgggagatccttcgccgtttgcgcgacacctgcccgtgctttctcgcgcgccagacgcacaacatactgctgcgcgctctcctgcggctgacgctgctcctcaatgcccgtaacaatacgttcaaaggtcacgccaagttgcgcaagtaactcctgacgacgcggagaaccggaagctaaatacagagaagtcatagaaacctttattgcactgcaaactgctgacggactttgcgcatcagcaagaaaatccacggccagagcaccccattgactacactactccagaacacttccggtctgaaagagacgttaatcactaaaaactctgcccagaaaacaataatatccaccaccaggctaagcaacatgacgaccagcgcctgctgccataatgcgaggttgcggaaaagctggtatttcagcgccaccaggtaagcaatgatgctcatcgccaatacgcgtacgccaagcgtgctgccgctgatcagatccagtatggcacccatcacaaaacctgtgcccacatttacgcgatgaggcaaggccaggatccaatacaacaagatgagtaacacccagtttggccggaaaacaatcaggttatccggccagggcatgatttgcagcaacagcgcaatgaggaaagagagccagattacccagcgtccctggctacgatagctcgccactattgccctcccggcgcacgttattgccctcccggcgcacgcgcaggcggttgagcaccactttgcggcggcgtagccctttgtggagagcgattagcagcaggctgtgtcggcgcagcaggcgcagtagctgcatttcctgtcgccggttgctgcggagtcggctgagcgatccccgttgccggttcaggtaactttggccccatcgcgtctgggctaggcaatacctgcggcatcatctgcatcagacgttcattagcaacacgatgcacctcttccggcgtcatcgggttagcgccgttacgatctgccccccacagcagcagcagataacgcaaacgttgcagccctgcagtcggacgcgcctgaatcacagtataagcgcgctgggtatcgagttttacggaagagacaaccgcgaccggatagccttccgggaaacgaccgcccagaccggaagtcaccagcacatcaccaacacgaatatccgtattcgccggcagatgctcaagctgcaaatcatccgtacaaccgttaccggctgcaattacgcggatatcgttgcgcagcacctggattggcagcgcgtgggtcgcatcacaaatcagcagcacgcgactggtcagtttagcgacggccaccacctgaccaacaacacctttgtcgctgatgaccggctggccttcataaacgccattaacgctacctttatcgataacaacttgatcgctataaggatcgttaaccgtggagataacctgagtcaccattttctgctcatcctgacgcagcggggaacccagcagctcgcgcagacgcgcgttctcctgtttgtattgtccaagcatcagcagttcactgtttttcagcaacagttcctgacgtaacgcccggttttcaagttctaattggtcacggctggccagcgtctggcttacgccatccagcaattcacgaggagcattggaaacaaagtagaaaggactgacggcggtatccatataagtacggatttgactgaacgtccccaggcggctgtcggcaataataatgccgagcgccaccagcaccgccagaataaggcgaatctgtaggctcgggccacggctaaaaattggcttcataagttatgcgtattctcgtatcagaccaggcagggtaaacagacacttcccctgcctgcatccgattactcttcgctgaacaggtcgccgccgtgcatgtcgatcatttccagcgctttgccgccaccgcgcgccacacaggtcagcgggtcttcagcaacaacgactggaatgccggtttcttccattaacaaacggtcaaggttacgcagcagtgcgccaccaccggtgagcaccatgccgcgctcggagatgtcggaagccagttccggcgggcactgttccagtgcaaccattaccgcgctcacaataccggtcagcggttcctgcagtgcttcgaggatttcattggagttcagggtaaaaccgcgtggaacaccttctgccaggttacggccacgaacttcgatttcacggacttcatcgcccggataagcgctaccgatttcgtgcttgatacgttctgcggtggcttcaccgatcagagaaccgtaattacgacgcacatagttgatgatagcttcgtcgaaacggtcaccaccaatgcgcacagaagaggagtaaaccacaccgttcaaggagataacagcaacttcagtggtaccaccaccgatatcaaccaccatagaaccggtcgcttcagaaaccggcaggccagcaccaattgcggcagccatcggttcttcaatcaggaagacttcacgggcaccagcgccctgcgcggattcacgaattgcgcggcgttcaacctgggtcgcgccaaccggcacacaaaccagaacgcgcgggcttggacgcataaagctgttgctgtgcacttgtttgatgaagtgctggagcattttttcagtcacgaagaagtcggcgataacgccgtctttcattgggcgaatggcagcaatattgcccggcgtacggcccagcatctgcttcgcgtcatgacctactgcagctacgcttttcggactaccggcacgatcctgacgaatggccaccacggaaggctcattcaatacgatgccttgtccttttacataaatgagggtattcgcagtacccaggtcaatggacaagtcattggaaaacatgccacgaaattttttcaacatactaagggataatcctgaaagctggggcggaaaagaaaatccgcttactttaccaaccacacgcagcagcgacaaggcgcaaaaatcatctgctacggtgaaaattagtgcagttcgtttcctttgttacaaatctctgcctgagtccagaaaggcttaatgcatcagcagcattcctcgcctgtttgcaaccgcgtaaggtcattcatctgcatatgtgctgcaacaatctggcgagcagacaagcacactcccatgagacgcagcgcgcattattctacgtgaaaacggattaaacggcaggttaaacgctgtatctttgactatattttttcacgttagtatcaagtggctgactggacgcgaaaaaatccccttgcccgcctgtaacaccgcgctgaatcagggtctgccactcgcttcggctacgcacgccggtggcgtaaacctgggtgctggtcccggagcaggcttccaccaggctttgaaccagcagctggttctccgttcgcttctcaatgtttctgaccagccccggatggagcttgagtaactcaacattaagttctttgatccaactggtacttaccagcgtcaaaccagcctggttgacggctacccgtacccctaaagcattcactaaacgaataacaggttgtaaacgactgatatgttgacctacatcggcctctgcaagttcaataattatgcgttttcgttgacttttttcacattgcattaacgtatcgcgcagccaacgctgaaaacgcgggcgaatcaggctctcaacggtaacctgaatcgccagattttcctctggccagtaacgcaatagtggaataagacggctgatttgcagacggtcatactcttcgcttaagccaaactgcaagaccatcggcatatactccgcgctgctaacctcttcattaccatcgaagatgcggcacatgagttcgcgatgatgaacctgaccttcgcgagtaaccgccggtttttgataaaggcgcgggccgccgcgactgagcatttgctcgataagcgtacgccagcgaacattaccgcgtcctttttcaggcaagctgtcatcgtaaatagcccagctattgccgccctgcaatcccgcattacgcgtggcagactctgcatgttccattacctgctcggtatcctgaccactacgccaggcgcagataccaatgtggatcatatcgtcgcgatcgagcattttattgttcggcaaggtatcaacggctttgattaactgaccggcgatgctctctgcctcttttaacgtccggtgcggtaacagcgcagcaaaatcactgcggtggtaacgcgccagcagtgcgccagggtagcgcatcataaatgtgctcagcagattcgtcagagtgaagaactgttcttcaacctggctgtgcccccaggtatcgctcaacatattgaaatccggcagacgaatcatcatcacgatcccgtgggtacctactttctcctgatcttccagtaacgttgctaactgattatcgaaaaagagtcggttattgaggccggttttcacgtcctgggcggcataagagcggatcagcgtatcaagacggctgtgttgttcgcgtgcgttctgaatttcacgaagcagcgtatccagcgcactgctggttctgggcggccattcatagatggttcccaacacattagagccacgctcaccgtttaagatacgagtagcccgggtttccagcaattcttgcccggcaagttgccgttgtaaccagcgtaccgccaggaagagcataacaatgataaagccaatcgcccccgtgagcggcgcggtggtcatcaagctatggaaatagttgcccatcggatcctgataaaccagacgcaagctcatccccggatgctttatcaacggaacgctcagttcgcgaaacagatcgctggagccaactggacgataactaccatttctggccagggtataaacctgtttatcaccatggagcaggtctacacgaacgatatctgcgctcatcattaattcggtaatttgtggccttaatacgctgaagtcattgctcacaaggtgggtatcaatcgccgtcgccaccgcctgaacgcgatgactaaacttatactgaatggcgttgtagaaacttaggctacagcccagcaaagtcacaaaaattgttaacccggtgagcagcgtaacaaaggcgctaaatttcgtcgttaatctcatccttgtgttaactccgatagtgaggaagcgggcatactagcaaatcagatttatctcgcaatttattgcgcttcatcggctttgcttttccattagcgagtatagtcttcagaaattattttccaatccatcatgcacatgaggaccacttatgcaggcgttacttttagaacagcaggacggcaaaactctcgcaagtgtacagactctggacgaaagtcgcctgccggagggcgatgtcacggtcgatgttcactggagcagcctgaactataaagatgcgctggcgattaccggtaagggaaaaatcatccgtaattttccgatgattcctgggatcgattttgccggaactgtacgcaccagcgaagatccgcgttttcatgccggtcaggaggtgttactcactggctggggcgttggtgaaaaccactggggtgggctggcggagcaggcgcgagtgaaaggtgactggctggttgccatgccgcaagggctggacgcgcgtaaagcaatgattatcggtactgccggttttaccgccatgctgtgtgtgatggcgctggaagatgccggtgttcgcccgcaggacggggagattgtcgtgacgggtgccagtggtggcgtcggcagtaccgccgtggcgctgctgcataagttgggttatcaggtcgttgccgtttccggtcgcgaaagtacccatgaatatctgaaaagtttaggtgctagccgtgttctccctcgtgatgagtttgccgaatcccgtcctctggaaaaacaagtctgggctggggcaattgacaccgttggcgacaaagtgctggcaaaagtgctggcgcaaatgaattacggcggctgcgtggcggcctgtggtctggcgggtggttttactctgccaaccacggtcatgccatttattctgcgtaatgtccgtttgcaaggggtggatagtgtaatgacgccaccagaacgccgcgcacaagcctggcagcgactggtcgccgatttaccggaaagtttctatacccaggcggcaaaagagatatctctgagtgaggcaccgaactttgccgaggccatcattaataaccagatccagggtcgcacgctggtgaaggttaactaaccatttagcagggaataataagagagggaactcattttgaaatcattattcaatcggttaacgggaaaagcggttagccggacagctttcgtcgaacaccttggtcaggaagttatacaacatcatccaaactggaaagtcatgatttcgactgaccacaaattgatgcgcattgatactccactaaacagctattattgatacgcctccgtcgcctgttaggtttatgttgctttgcctgggcgacgctacgcttagccccttacttatttctggtaccatggggtgaataatctgattttgtttgactacaaattaatcactcgaacctatttaatgctgagcattgtcaatcggttaattttgcgtgctttagcattcacatctatccagacgatgcagtgaaaattgggtaatccccagcaaccgctgcgtaatgtcgtctatcttgtcgcgatcctggcatccctacattatttgtggtctgtgaagattatctcattgcagcccctcatcttcgcagggctggcttttcagcttttcaccttacgttataagaagttccgtcgatgatggcgctaatttcgtgaattgtgcggcttgttgcaaattacacggtgttgaaggttatttacatgttagctgttgattatcttccctgataagaccagtatttagctgccaattgctacgaaatcgttataatgtgcgacctcgtcctccctgacgcagtttttgcgctgcggaaaaggtgacattggcgcaacgaaggtatattttgttttttgccggaggatagcagcagatcgctgcacaatgtccgtcaagtctaacattgacactctggggcaaaatagaccggcgtcccggcctgctggaatttatcgctatgcatacagctgtcggggcatacgctttacagacggcggtgaaacgcctgtcacaatcacactaaacaaagagtacggaacccactcatggatattcgtaagattaaaaaactgatcgagctggttgaagaaagtggcatctccgaactggaaatttctgaaggcgaagagagtgtacgcattagccgtgcagctcctgccgcaagtttccctgtgatgcaacaagcttacgctgcaccaatgatgcagcagccagctcaatctaacgcagccgctccggcgaccgttccttccatggaagcgccagcagcagcggaaatcagtggtcacatcgtacgttccccgatggttggtactttctaccgcaccccaagcccggacgcaaaagcgttcatcgaagtgggtcagaaagtcaacgtgggcgataccctgtgcatcgttgaagccatgaaaatgatgaaccagatcgaagcggacaaatccggtaccgtgaaagcaattctggtcgaaagtggacaaccggtagaatttgacgagccgctggtcgtcatcgagtaacgaggcgaacatgctggataaaattgttattgccaaccgcggcgagattgcattgcgtattcttcgtgcctgtaaagaactgggcatcaagactgtcgctgtgcactccagcgcggatcgcgatctaaaacacgtattactggcagatgaaacggtctgtattggccctgctccgagtgtaaaaagttatctgaacatcccggcaatcatcagcgccgctgaaatcaccggcgcagtagcaatccatccgggttacggcttcctctccgagaacgccaactttgccgagcaggttgaacgctccggctttatcttcattggcccgaaagcagaaaccattcgcctgatgggcgacaaagtatccgcaatcgcggcgatgaaaaaagcgggcgtcccttgcgtaccgggttctgacggcccgctgggcgacgatatggataaaaaccgtgccattgctaaacgcattggttatccggtgattatcaaagcctccggcggcggcggcggtcgcggtatgcgcgtagtgcgcggcgacgctgaactggcacaatccatctccatgacccgtgcggaagcgaaagctgctttcagcaacgatatggtttacatggagaaatacctggaaaatcctcgccacgtcgagattcaggtactggctgacggtcagggcaacgctatctatctggcggaacgtgactgctccatgcaacgccgccaccagaaagtggtcgaagaagcgccagcaccgggcattaccccggaactgcgtcgctacatcggcgaacgttgcgctaaagcgtgtgttgatatcggctatcgcggtgcaggtactttcgagttcctgttcgaaaacggcgagttctatttcatcgaaatgaacacccgtattcaggtagaacacccggttacagaaatgatcaccggcgttgacctgatcaaagaacagctgcgtatcgctgccggtcaaccgctgagcatcaagcaagaagaagttcacgttcgcggccatgcggtggaatgtcgtatcaacgccgaagatccgaacaccttcctgccaagtccgggcaaaatcacccgtttccacgcacctggcggttttggcgtacgttgggagtctcatatctacgcgggctacaccgtaccgccgtactatgacagtatgatcggtaagctgatttgctacggtgaaaaccgtgacgtggcgattgcccgcatgaagaatgcgctgcaggagctgatcatcgacggtatcaaaaccaacgttgatctgcagatccgcatcatgaatgacgagaacttccagcatggtggcactaacatccactatctggagaaaaaactcggtcttcaggaaaaataagactgctaaagcgtcaaaaggccggattttccggccttttttattactggggatcgacaacccccataaggtacaatccccgctttcttcacccatcagggacaaaaaatggacactcgttttgttcaggcccataaagaggcgcgctgggcgctggggctgacccttttgtatctggcagtttggttagtagccgcttacttatctggcgttgcccccggttttaccggctttccgcgctggtttgagatggcctgcatcctgacgccgctgctgtttattggactgtgctgggcgatggtgaaatttatctatcgcgatatcccactggaggatgacgatgcagcttgaagtaattctaccgctggtcgcctatctggtggtggtgttcggtatcagcgtttatgcgatgcgtaaacggagcaccggcaccttccttaatgagtatttcctcggcagccgctctatgggcggtattgtgctggcgatgacgctcaccgcgacctatatcagtgccagtagctttatcggcgggccaggagctgcttataaatacgggctgggctgggtattgctggcgatgattcagcttcctgcagtctggcttagtctcggtattctcggcaagaagtttgcgattcttgcgcgccgctacaatgcagtgacgctgaacgatatgctgtttgcccgctaccagagtcgtcttctggtgtggctggcgagtttgagtttgctggttgcgttcgttggtgcgatgaccgtgcagtttatcggcggtgcgcgcctgctggaaaccgcggcgggtattccttatgaaaccgggctgctgatttttggtatcagcattgcgttatataccgcctttggtggctttcgcgccagcgtgctgaacgacaccatgcaagggcttgtgatgctgattggcaccgttgtgctgcttattggcgtagtacatgccgctggcggcttaagtaacgcagtacagaccttgcaaaccatcgatccgcaactggttacgccacaaggcgctgacgatattctgagccctgcctttatgacgagcttctgggtactggtgtgttttggcgtgattggcctgccgcatactgcggtgcgctgtatctcttataaagacagcaaagccgtacatcgggggatcatcatcggtacgattgtggtcgcaattctgatgttcggtatgcacctggccggagcgttaggtcgggcggtgatccccgatctcaccgtaccggacctggtgatcccaacgttaatggtaaaagtgctgccaccgtttgctgccgggatcttcctggctgcaccgatggctgcgatcatgagcacaattaacgcccaactgctgcaaagttccgctacgatcattaaagatctctatctgaatatccgtccggatcaaatgcaaaacgagacgcgtctgaagcggatgagcgcggtaattacgttagttctcggcgcgttgctgctgcttgccgcctggaagccgccagaaatgatcatctggctgaatttgttggccttcggtgggctggaagccgttttcctgtggccgctggtgctgggtctttactgggaacgcgccaacgccaaaggcgcgctaagtgcgatgatcgttggcggcgtgctgtatgccgtactcgcgacgctgaatattcagtacctgggcttccaccctatcgtgcccagcttactactaagtttgctggctttcctggtcggaaaccgtttcggtacatccgtcccgcaagctaccgttttgactactgataaataaagagttttgccatgccttggatccaactgaaactgaacaccaccggcgcgaacgcggaagatcttagcgatgcgctgatggaagcgggtgccgtttctatcacttttcaggatacccacgatacgccagtatttgaaccgctgccgggcgaaacgcgcctgtggggcgacaccgatgtgattggtctgttcgacgctgaaaccgatatgaacgacgtggtggcgattctggaaaaccatccgctgctcggcgcaggcttcgcgcataaaatcgaacaactagaagataaagactgggagcgcgaatggatggataatttccacccgatgcgctttggtgaacgactgtggatctgccctagctggcgtgatgtgccggacgaaaacgccgtcaacgtgatgttagatccagggctggcgtttggtacgggtacccatccaaccacctctctgtgcctgcaatggctcgacagcctcgatttaaccggtaaaacagtcatcgactttggctgtggttccggcattctggcgatcgcggcgctgaaactgggtgcagcaaaagccattggtattgatatcgatccgcaggcgattcaggccagccgcgataacgccgaacgtaatggcgtttctgaccgtctggaactctacttaccgaaagatcagccagaagaaatgaaagccgacgtggtggtcgctaacatccttgcaggcccattacgtgaactggcaccgttaatcagcgtcctgccggttagtggcggtttgctgggcctttccggtattctggcaagccaggcagagagcgtttgtgaagcttatgccgatagcttcgcactggacccggtcgtggaaaaagaagagtggtgccgtattaccggtcgtaagaattaaccttcgcatcgccgtagggtgacgcggggcgaagtgcgagcaagctcacaaaaggcacgtaaatttgccgattatttacgcaaatttgcgtgccaaaattttcattcataaagaaaaattgagaacttactcaaatttctttgagtgtaaattttagtcactattttctaatatgatgatttttatgagtaattatcgcaccacgctcattttaaatgcaattctttgatccatctcagaggattggtcaaagtttggcctttcatctcgtgcaaaaaatgcgtaatatacgccgccttgcagtcacagtatggtcatttcttaactcatgcgcatcggacaatatcagctcagaaatcgcctgatcgcagcgcccatggctggcattacagacagaccttttcggacgttgtgctacgagatgggagccggattgacagtatccgagatgatgtcttctaacccacaggtttgggaaagcgacaaatctcgtttacggatggtgcacattgatgaacccggtattcgcaccgtgcaaattgctggtagcgatccgaaagaaatggcagatgcagcacgtattaacgtggaaagcggtgcccagattattgatatcaatatgggttgcccggctaaaaaagtgaatcgcaagctcgcaggtagtgccctcttgcagtacccggatgtcgttaaaagcatccttaccgaggtcgtcaatgcagtggacgttcctgttaccctgaagattcgcaccggctgggcaccggaacaccgtaactgcgaagagattgcccaactggctgaagactgtggcattcaggctctgaccattcatggccgtacacgcgcctgtttgttcaatggagaagctgagtacgacagtattcgggcagttaagcagaaagtttccattccggttatcgcgaatggcgacattactgacccgcttaaagccagagctgtgctcgactatacaggggcggatgccctgatgataggccgcgcagctcagggaagaccctggatctttcgggaaatccagcattatctggacactggggagttgctgcccccgctgcctttggcagaggttaagcgcttgctttgcgcgcacgttcgggaactgcatgacttttatggtccggcaaaagggtaccgaattgcacgtaaacacgtttcctggtatctccaggaacacgctccaaatgaccagtttcggcgcacattcaacgccattgaggatgccagcgaacagctggaggcgttggaggcatacttcgaaaattttgcgtaaacagaaataaagagctgacagaactatgttcgaacaacgcgtaaattctgacgtactgaccgtttctaccgttaactctcaggatcaggtaacccaaaaacccctgcgtgacagcgttaaacaggcactgaagaactattttgctcaactgaatggtcaggatgtgaatgacctctatgagctggtactggctgaagtagaacagcccctgttggacatggtgatgcaatacacccgtggtaaccagacccgtgctgcgctgatgatgggcatcaaccgtggtacgctgcgtaaaaaattgaaaaaatacggcatgaactaattcaggttagctaaatgcttgattaaaaaggcgctactcggcatggggaagcgccttttttataggtgtcacaaagggagtgaccatgagaacaggatgtgaaccgacccggtttggtaatgaagctaagaccattattcacggtgatgcgcttgccgaacttaaaaagatccccgccgaaagtgtcgatctgatctttgccgacccaccatataacatcggtaaaaattttgatggtctgatcgaagcctggaaagaagatctgtttatcgactggctgtttgaagtgattgcagagtgccaccgcgttctgaaaaagcagggcagcatgtacatcatgaacagtacggaaaacatgccctttatcgatctccagtgccgcaagctttttaccatcaaaagtcgcatcgtctggagttatgacagttctggagtgcaggcgaaaaaacactacggctccatgtacgaacccatcctgatgatggtgaaagacgcaaagaactacacattcaacggtgatgctattctggtagaagccaaaaccggaagccagcgcgcgttgatcgattatcgcaaaaatcctccacagccttacaatcatcaaaaagtaccgggtaacgtttgggattttccgcgcgtgcgttatttgatggatgaatatgaaaaccacccgacgcaaaaaccggaagccttactgaaacgcattattctcgcctcttccaacccaggcgatatcgttctcgacccgtttgctggtagctttactaccggtgccgtagccatcgccagcggacgaaaattcattggtattgagatcaacagcgagtacatcaaaatggggcttcgacggctggatgtcgcgagccattactctgcggaagaactggcgaaagtgaaaaaaagaaagaccggcaacctgagtaaacgaagccggttaagcgaagttgaccccgatctcattacaaagtaaaggatgtgtaagcctggttttcagattattcatttcgtgtatatttcctgccagacttggttaaacatgcacaggctcaggtaatgattcgcaagtattggtggctcgtcgttttcgctgtcttcgtttttctgtttgatactttactgatgcagtggattgaactgctggcaacagaaacagacaaatgccgcaatatgaacagtgttaatccactaaaactggttaactgtgacgaactgaattttcaggacagaatgtgaatttacatgacacttaattcattcgtttgatgaattaatttcgttatgttttcatctggcatgaacattcttaatacgttatcgaccagagcgggggcttgtttataaagatcataacccgccatattcattaaccagttttgaacaattccgctgaaggcaccatcaataataatcatcacaacatctaaatcgaggttatttgctacacaaccttgttgctgacacgcctgcaatacttcgcggagagtctgcggattaaagcccatcttttcgcgtatcactccctcggccagcatctcatcattaaattcacatttgtgatataagattttcagcaacgcctgctggcggggaattttggcaatatattgcaagccgacaatcaatttttcacgcaattgttgaaacgggtcatgctctaatccagccgtcaagtgttcctggattaactcccgcaaactaggctgttgcaaccacatctcattaaacagttgagtcttgttttcgaagtgccagtagatagcgccacgcgtaacgttagcggcgtcggcaatgtcgttgagcgtcgtcttgcttacgccatgctgcgcaaactgggcgatggcagtttcaatcagttcttgccgggtcttcagagcttcggctttggttctttttgccatgattaattattcaggaaataaatatattcgacacagagtgagaaaatagcgaaggttaatctatcacctaatgtgtatttatacgagaggctaatattgagttgctataaatcgttaaataaataatatatattatttacctaagatacattcactacatcaatatatatttcaatttacgaggttttaattctgcctctttcaacccgcgtcaaaataaaacagtagaatattaatctttttttgtgtttatgtgccttgagatgcctgtattcataactattccttacatcgacgaatgataatttgtaggatagcgaactgtatttttctttctgcgagttaacgcgttgcctttttgggtaaataacgcgcttttggttttttgaggaatagtaatgacgaaacatgccaggtttttcctcctgccctcctttattctgatctccgcggctttaatcgccggttgtaacgataagggagaagagaaagctcacgtcggtgaaccgcaggttaccgttcatattgtaaaaacggccccgttagaagttaagactgaattaccaggccgcaccaatgcttatcgtatagccgaagttcgcccacaggttagcgggatcgtactgaatcgcaatttcactgaaggcagcgatgtgcaagcaggccagtccctgtaccagatcgatcccgcgacctatcaggcaaattatgacagcgcgaaaggcgaactggcgaaaagtgaagccgccgccgccatcgcgcatttgacggtaaaacgttacgttccgctcgtgggtacgaaatacatcagccagcaggagtacgaccaggccattgctgatgctcgtcaggccgatgccgccgtgattgccgcaaaagccacagtcgaaagcgctcgcatcaatcttgcttataccaaagtcactgcgccaattagcggacgtatcggcaaaagcactgtgaccgaaggcgctcttgtcactaatgggcaaacgactgaactggcgactgtccagcagctcgatcctatctacgttgatgtgacccaatccagcaacgattttatgaggctgaagcaatccgtagagcaaggaaatttgcataaggaaaacgccaccagcaacgtagagttggtcatggaaaacggtcaaacctatcccctgaaaggtacgctgcaattctccgatgtgaccgttgatgaaagcaccggctccataaccctacgtgctgtcttccctaacccgcaacatacgcttttgccgggtatgtttgtgcgtgcacggattgatgaaggcgtccaacctgacgccattcttatcccgcaacaaggcgttagccgcacaccgcgtggtgatgcaaccgtgctgattgttaacgataaaagtcaggttgaagcgcgccctgtcgttgccagtcaggcgattggcgataaatggttgattagtgaaggactgaaatctggcgatcaagtcattgtcagcggcctgcaaaaagcgcgtccgggagagcaggttaaagccactaccgatacccccgcagatactgcaagcaagtaaggtaatctgacatggcaaacttttttattcgacgaccgatatttgcatgggtgctggccattattctgatgatggcgggcgcactggcgatcctacaattgcccgtcgctcagtatccaacaattgcaccgcctgcggtttctgttagtgcaaactatccgggcgctgatgcgcagaccgtgcaggatacggtgacgcaggttatcgaacagaatatgaacggtatcgataacctgatgtatatgtcctccaccagcgattccgccggtagcgtgacaattacccttaccttccagtccgggaccgatcctgatatcgcgcaagtgcaggtgcagaacaaactccagctcgccacgccgttgctgccgcaggaggttcagcagcaggggatcagtgttgaaaagtccagtagcagctatttgatggtggcgggctttgtctctgataacccaggcaccacacaggacgatatcagcgactatgtggcctctaacgttaaagatacgcttagccgtctgaatggcgtcggtgacgtacagcttttcggcgcacagtatgcgatgcgtatctggctggatgccgatctgctaaacaaatataaactgacaccggttgatgtgattaaccagttgaaggtacagaacgatcagatcgctgccggacagttgggcggaacgccagcgttaccagggcaacaattgaacgccagcattattgctcagacgcggtttaaaaatccggaagaattcggcaaagtgaccctgcgcgtaaacagtgacggcagcgtggtacgcctgaaagatgtcgcacgggttgaacttggcggtgaaaactataacgttatcgctcgtatcaacggaaaaccggcggcgggcctggggattaagctggcaaccggcgcgaatgctctcgataccgcgaaagccattaaggcaaaactggcggaattacagccattcttcccgcagggaatgaaggttctctacccttatgacaccacgccattcgtccagctttctattcacgaagtggtaaaaacgctgttcgaagccattatgctggtgttcctggtgatgtatctgttcttgcagaatatgcgagcaacgctgatccccgccattgcggtacccgtggtgttgttagggacgtttgccatcctcgccgcttttggttactccatcaacacactaacgatgttcgggatggtgcttgccatcgggctgctcgtcgatgatgcgatagtggtggtggagaacgtcgagcgcgtgatgatggaggataagctcccgccaaaagaagcgacggaaaaaagcatgagccaaattcagggcgcactggtgggtatcgcgatggtgctgagtgcggtatttattccgatggcattcttcggcggttctactggggcaatttatcgccagttctctatcaccatcgttagcgcaatggcgctttctgttctggtggcattgattcttacccctgcgttatgtgcaacgctgcttaaacccgtctctgctgagcatcacgaaaataagggcggtttcttcggttggtttaataccaccttcgatcatagcgttaaccactacaccaacagcgtcggcaaaatcctcggatccacaggacgatatttactgatctatgcgctgattgttgcaggaatggtggtgttgtttttacgtcttccgtcttccttcttacctgaagaggatcagggtgtctttctgaccatgattcagttacccgctggcgcgacgcaagagcggacgcaaaaagtgttggatcaagttacggattactatctgaagaacgagaaagcgaacgttgaaagtgtctttacggttaacggctttagcttcagcggccaggcacaaaacgccggtatggccttcgtcagtctgaaaccgtgggaagagcgtaatggtgacgaaaacagtgcggaagcggtaatccatcgtgccaaaatggaattgggcaagatccgcgacggttttgtcattccattcaatatgccagccattgttgaactgggcacggcaacgggtttcgactttgagttaattgatcaggctgggctgggtcacgatgccctaacccaggcccgtaaccagttgcttggtatggcggcgcaacatcctgccagcttagtcagcgtgcgccctaatggcctggaagacaccgcgcagtttaaactggaagttgaccaggaaaaggcgcaggcattaggtgttagtctttctgacatcaatcagaccattagtacggcgctgggtgggacttacgttaacgacttcatcgaccgtggccgcgtgaaaaagttgtatgttcaggcggatgccaaattccgtatgctgccagaagatgtcgataaactttatgtccgcagcgccaacggcgaaatggtgccattcagcgcctttaccactagtcattgggtgtatggctctccgcgactggaacgctacaacggtctgccgagtatggagattcagggggaagccgcgccaggaaccagttccggcgatgccatggcgttgatggaaaaccttgcgagtaaattacctgcgggcattggttatgactggacgggtatgagctatcaggaacgcttaagcggaaaccaggctcccgctctggtagcaatttcctttgtggttgttttcctgtgccttgctgcactctatgaaagctggagtattcctgtcagcgttatgttggtagtgccgttagggattgtcggcgtgctgctggcggcgacactctttaatcaaaaaaatgacgtctactttatggtgggcttgctaacgacaattggcttgagcgccaaaaacgctattttgatcgttgagttcgctaaagatctcatggagaaagagggtaaaggtgttgttgaagcgacactgatggcagtacgtatgcgtctgcgtcctatcctgatgacctctctcgcctttattctcggcgtattaccgctagctatcagtaacggtgccggcagtggcgcgcagaacgctgtgggtatcggggtaatgggaggaatggtctctgcaacgttgctggcaatcttcttcgtaccggtgttctttgtggtgatccgccgttgctttaaaggataaatcagaaacataaaggcgctttcgggtgcctttattatttccagtgaaacccataaaaattaataagatattcttctgctcactctttaaaagctttctatagttcccgctcccttcactatttttacaattcacataatttgtcattattcattccgcaagatttataacctccggtgataaaatggcattcagctcgttaataagagagttaacttattaagcgttagcgtttattactgaggtaacaccatgaaaagattaattcctgtggcattgctcaccgcattgctggcgggctgtgctcacgatagcccctgcgttccggtttatgacgatcagggtcgtctggttcacaccaatacctgtatgaaaggcacgactcaggataactgggaaacggctggggctattgccggcggggcagctgctgttgctggcctgacgatggggatcatcgctctaagcaaataactgaacagggcgcggagttccgcgctctttttaacgatacagtatctctccataagataaaatattgctatattctgctgggtaattccctgctgatttagcatgttacatcgcgttatttcgctgctttcgaaataacgcatcaatttaattttcacacttcccaccagaaatatactcacgctaacaatcattattctgcttagtaaaacacgcgtaaatattttgcgccaaaatgtggcgcatgtttcattttcgcaccattgcggggcgctgtttttattatttcctgtctacactcagcttattgcgacgcgaaatcgtgcgcaaaagctggcactacttttgcttataagaggatggccacagacaggtaaaagacgtttcccaaacgtcctataacgataattttcgcctcacaggaagcattatgaaaaagatgatgatagccacactggctgccgccagcgtgctgcttgccgttgcaaatcaggcgctgctggcgcgacgcttgatgccgttcagaaaaaaggttttgtgcaatgcgggatcagtgatggattacctgggttctcttatgccgatgctgacggtaagtttagtggtattgatgttgatatttgtcgtggtgttgccgctgctgtatttggtgacgacacgaaagtgaaatataccccgctcactgcaaaagaacgcttcaccgctttacagagtggggaggtggatttgctctcccgtaatacgacctggactagttctcgcgatgccgggatgggaatggcatttaccggcgtcacttattacgacggcattggcttcctgacgcacgataaagcggggctaaaaagcgcgaaagaactggatggcgctaccgtctgtattcaggcgggtactgataccgaactcaacgtcgccgactacttcaaggcaaacaatatgaagtacacaccggtgactttcgatcgctctgacgaaagtgcgaaggcactggaatctggtcgctgcgatacgctggccagcgatcaaagtcaactgtatgccctgcgcatcaaattaagcaacccagctgaatggattgtcttaccggaagttatcagtaaagaaccgcttggtccggtagttcgtcgtggcgatgatgaatggttcagcattgtacgctggacgcttttcgccatgctgaatgctgaagagatgggcatcaattcccagaacgtcgatgaaaaagcggctaatccagcaacgcctgatatggcacatctgctgggtaaagaaggcgattacggcaaggatctgaagctggataataaatgggcctataacatcatcaaacaggtgggtaactacagcgaaatttttgagcgtaacgtaggtagtgaaagcccgctgaaaattaaacgtgggcaaaataatctctggaataacggcggtattcagtacgcaccgcccgtgcgttaagtcggtgtgaggtaacgagcgtcgctacggcggcgctctcttcagcgttatgctttccgaggtttctatgtctcatcgccgcagtaccgttaaaggcagtctctcttttgccaaccctacggttcgcgcctggttattccagatccttgccgttgttgctgttgtcggcattgttggttggttatttcacaacactgtaacgaatctcaataatcgtggcattactagtggttttgcctttctggatcgcggcgctggcttcggtattgtccagcatttgatcgattaccagcagggcgacacctacggacgcgtttttattgtcggcttactcaatacgctactggtttctgcattgtgtattgtgttcgcttctgttttgggcttctttatcggtctggcgagacttagcgataactggctgctacgaaagctttccacaatttatattgagatcttccgtaatattcccccgctgctgcaaatcttcttctggtactttgccgtgttgcgcaatttgcccggaccacgccaggctgtgagcgcgtttgatctggcctttttgagcaatcgtgggctttatattccgagtccgcagctgggagacggatttattgcgtttatcctggctgttgttatggctatagtcctttctgttgggctattccgctttaataaaacataccagataaagaccggacaactgcgccgcacctggccgatcgccgcagtgttgatcattggtttgcctttactggcgcaatggctttttggcgcagcactacactgggatgtcccagccctacgaggctttaacttccgcggcgggatggttttaattcctgaactggcagccttaacgctggcacttagcgtttatacatctgcatttatcgccgagattatccgcgctgggatccaggcagtgccttatggtcaacatgaagcggctcggagtctgggattacccaacccggttacgctacgccaggtcattattccccaggcattgcgggtgattattccaccgttaaccagccagtatctcaacatcgtcaaaaactcctctcttgccgccgctattggctatcccgatatggttagcctgtttgccggcaccgtgctgaatcagacggggcaagccatcgagacgatagccatgaccatgagcgtctatctgattatcagcctgactatcagcctgctgatgaatatctataaccgccgcatcgcgatcgttgaacgctaaggagtcatgatgacaaaagtattgctgtctcatcccccgcgcccggcgagccataacagtagccgcgcgatggtgtgggtgcgaaaaaatctgttctccagctggagcaatagcctgctgactattggctgcatatggttgatgtgggaactgatcccaccgttgctgaactgggcatttttgcaggctaactgggttggcagtacgcgtgccgactgcacaaaagccggtgcctgttgggtcttcatccacgaacgatttggtcagtttatgtatgggctttacccacacgaccaacgctggcgaattaacctcgcattactgattgggcttgtgagcatcgcaccaatgttctggaaaatactcccgcatcgcggtcgctatattgcggcctgggcggtgatttacccactgattgtctggtggctgatgtatggcggtttttttgctcttgagcgggttgaaacccggcaatggggcgggctgacgctaactttaattattgcaagtgttgggattgcgggggcgctaccgtgggggatcttactggcgttaggtcgccgctcccatatgccgattgtgcgtatcttaagcgtcatttttatcgaattctggcgcggcgtgccgctgattaccgttctgtttatgtctagcgtcatgctgccgttgtttatggcagaaggcaccagtatcgacaaattgatccgcgcgctggttggcgtgatcctgtttcagagtgcatatgttgcggaagtcgtgcgaggtggattacaggcgctgcctaaagggcaatatgaagcggcagagagcctggcgttgggttactggaaaactcaggggctggttattctgccacaggcgttgaagctggtaattcctgggctggtaaataccatcatcgcactcttcaaagataccagcctggtgatcattatcgggttgttcgatcttttcagtagcgttcagcaggcaaccgttgatcccgcctggttgggtatgagcacggaagggtatgttttcgccgcgctgatctactggatcttctgtttcagcatgagccgctatagccagtatctggaaaaacgttttaacaccgggcgtacaccgcattgaggacactatgagccaaattttactgcaacctgctaacgcgatgattacgctggaaaacgtcaataaatggtatggacaattccatgttttgaaaaatataaatttaaccgtgcaaccgggagaacggatcgttctgtgtggccctagtggttccggtaaaagcacaaccattcgttgtattaatcatctggaagaacatcaacagggacggatcgtggtagatggcatcgaacttaatgaagatatccgcaatattgagcgcgtcaggcaggaagtgggaatggtctttcagcatttcaatctcttccctcatctgaccgttttacagaactgtaccctggcaccgatttgggtacgcaagatgcctaagaaagaggctgaagatctggcggtgcattacctagagcgggtgagaattgccgaacatgcgcataagtttcccggacagattagtggtggtcagcagcaacgcgttgccattgcgcgtagcctgtgtatgaagccgaaaattatgttgtttgatgagccaacgagcgcgctcgatcctgagatggtgaaagaggtgctggatacgatgattgggctggcgcagagcggtatgacaatgttgtgtgtaacacatgagatggggtttgcacgaaccgtcgctgaccgggtaatttttatggatcgtggggaaatagtggagcaagctgcacctgatgaattttttgcgcatcctaaaagtgagcgtacgagggcatttttaagccaggtaatccattaattgaatgttagttcgaaaagcaaaaaggccatcctttcggatggcctttcgcttgatttgatgtctggcagtttatggcgggcgtcctgcccgccaccctccgggccgttgcttcgcaacgttcaaatccgctcccggcggatttgtcctactcgggagagtgttcaccgacaaacaacagataaaacaaaaggcccagtcttccgactgagccttttgttttatttgatgtctggcagttccctactctcgcatggggagaccccacactaccatcggcgctacggcgtttcacttctgagttcggcatggggtcaggtgggaccaccgcgctactgccgccagacaaattcttttctaatctgccgaactttaacctaaaaagtggtgctgatacccagagtcgaactggggacctcacccttaccaagggtgcgctctaccaactgagccatatcagcacgctaaatttgatgcctggcagttccctactctcgcatggggagaccccacactaccatcggcgctacggcgtttcacttctgagttcggcatggggtcaggtgggaccaccgcgctacggccgccaggcaaattctgttttatcagaccgcttctgcgttctgatttaatctgtatcaggctgaaaatcttctctcatccgccaaaacagcttcggcgttgtaaggttaagcctcacggttcattagtaccggttagctcaacgcatcgctgcgcttacacacccggcctatcaacgtcgtcgtcttcaacgttccttcaggacccttaaagggtcagggagaactcatctcggggcaagtttcgtgcttagatgctttcagcacttatctcttccgcatttagctaccgggcagtgccattggcatgacaacccgaacaccagtgatgcgtccactccggtcctctcgtactaggagcagcccccctcagttctccagcgcccacggcagatagggaccgaactgtctcacgacgttctaaacccagctcgcgtaccactttaaatggcgaacagccatacccttgggacctacttcagccccaggatgtgatgagccgacatcgaggtgccaaacaccgccgtcgatatgaactcttgggcggtatcagcctgttatccccggagtaccttttatccgttgagcgatggcccttccattcagaaccaccggatcactatgacctgctttcgcacctgctcgcgccgtcacgctcgcagtcaagctggcttatgccattgcactaacctcctgatgtccgaccaggattagccaaccttcgtgctcctccgttactctttaggaggagaccgccccagtcaaactacccaccagacactgtccgcaacccggattacgggtcaacgttagaacatcaaacattaaagggtggtatttcaaggtcggctccatgcagactggcgtccacacttcaaagcctcccacctatcctacacatcaaggctcaatgttcagtgtcaagctatagtaaaggttcacggggtctttccgtcttgccgcgggtacactgcatcttcacagcgagttcaatttcactgagtctcgggtggagacagcctggccatcattacgccattcgtgcaggtcggaacttacccgacaaggaatttcgctaccttaggaccgttatagttacggccgccgtttaccggggcttcgatcaagagcttcgcttgcgctaaccccatcaattaaccttccggcaccgggcaggcgtcacaccgtatacgtccactttcgtgtttgcacagtgctgtgtttttaataaacagttgcagccagctggtatcttcgactgatttcagctccacgagcaagtcgcttcacctacatatcagcgtgccttctcccgaagttacggcaccattttgcctagttccttcacccgagttctctcaagcgccttggtattctctacctgaccacctgtgtcggtttggggtacgatttgatgttacctgatgcttagaggcttttcctggaagcagggcatttgttgcttcagcaccgtagtgcctcgtcatcacgcctcagccttgattttccggatttgcctggaaaaccagcctacacgcttaaaccgggacaaccgtcgcccggccaacatagccttctccgtccccccttcgcagtaacaccaagtacaggaatattaacctgtttcccatcgactacgcctttcggcctcgccttaggggtcgactcaccctgccccgattaacgttggacaggaacccttggtcttccggcgagcgggcttttcacccgctttatcgttacttatgtcagcattcgcacttctgatacctccagcatgcctcacagcacaccttcgcaggcttacagaacgctcccctacccaacaacgcataagcgtcgctgccgcagcttcggtgcatggtttagccccgttacatcttccgcgcaggccgactcgaccagtgagctattacgctttctttaaatgatggctgcttctaagccaacatcctggctgtctgggccttcccacatcgtttcccacttaaccatgactttgggaccttagctggcggtctgggttgtttccctcttcacgacggacgttagcacccgccgtgtgtctcccgtgataacattctccggtattcgcagtttgcatcgggttggtaagtcgggatgacccccttgccgaaacagtgctctacccccggagatgaattcacgaggcgctacctaaatagctttcggggagaaccagctatctcccggtttgattggcctttcacccccagccacaagtcatccgctaatttttcaacattagtcggttcggtcctccagttagtgttacccaaccttcaacctgcccatggctagatcaccgggtttcgggtctataccctgcaacttaacgcccagttaagactcggtttcccttcggctcccctattcggttaaccttgctacagaatataagtcgctgacccattatacaaaaggtacgcagtcacacgcctaagcgtgctcccactgcttgtacgtacacggtttcaggttctttttcactcccctcgccggggttcttttcgcctttccctcacggtactggttcactatcggtcagtcaggagtatttagccttggaggatggtccccccatattcagacaggataccacgtgtcccgccctactcatcgagctcacagcatgtgcatttttgtgtacggggctgtcaccctgtatcgcgcgcctttccagacgcttccactaacacacacactgattcaggctctgggctgctccccgttcgctcgccgctactgggggaatctcggttgatttcttttcctcggggtacttagatgtttcagttcccccggttcgcctcattaacctatggattcagttaatgatagtgtgtcgaaacacactgggtttccccattcggaaatcgccggttataacggttcatatcaccttaccgacgcttatcgcagattagcacgtccttcatcgcctctgactgccagggcatccaccgtgtacgcttagtcgcttaacctcacaacccgaagatgtttcacttcagagttgcgaaaatttgagagactcacgaacaactttcgttgttcagtgtttcaattttcagcttgatccagatttttaaagagcaaaacttcgcagtgaacctttgcaggtacactctgaagtattttttatttaatcactacagagatggtggagctatgcgggatcgaaccgcagacctcctgcgtgcaaagcaggcgctctcccagctgagctatagccccataacatgtagttaaaacctcttcaaatttgccgtgcaaatttggtaggcctgagtggacttgaaccaccgacctcacccttatcaggggtgcgctctaaccacctgagctacaagcctgtagaggttttactgctcattttcatcagacaatctgtgtgagcactgcaaagtacgcttctttaaggtaaggaggtgatccaaccgcaggttcccctacggttaccttgttacgacttcaccccagtcatgaatcacaaagtggtaagcgccctcccgaaggttaagctacctacttcttttgcaacccactcccatggtgtgacgggcggtgtgtacaaggcccgggaacgtattcaccgtggcattctgatccacgattactagcgattccgacttcatggagtcgagttgcagactccaatccggactacgacgcactttatgaggtccgcttgctctcgcgaggtcgcttctctttgtatgcgccattgtagcacgtgtgtagccctggtcgtaagggccatgatgacttgacgtcatccccaccttcctccagtttatcactggcagtctcctttgagttcccggccggaccgctggcaacaaaggataagggttgcgctcgttgcgggacttaacccaacatttcacaacacgagctgacgacagccatgcagcacctgtctcacggttcccgaaggcacattctcatctctgaaaacttccgtggatgtcaagaccaggtaaggttcttcgcgttgcatcgaattaaaccacatgctccaccgcttgtgcgggcccccgtcaattcatttgagttttaaccttgcggccgtactccccaggcggtcgacttaacgcgttagctccggaagccacgcctcaagggcacaacctccaagtcgacatcgtttacggcgtggactaccagggtatctaatcctgtttgctccccacgctttcgcacctgagcgtcagtcttcgtccagggggccgccttcgccaccggtattcctccagatctctacgcatttcaccgctacacctggaattctacccccctctacgagactcaagcttgccagtatcagatgcagttcccaggttgagcccggggatttcacatctgacttaacaaaccgcctgcgtgcgctttacgcccagtaattccgattaacgcttgcaccctccgtattaccgcggctgctggcacggagttagccggtgcttcttctgcgggtaacgtcaatgagcaaaggtattaactttactcccttcctccccgctgaaagtactttacaacccgaaggccttcttcatacacgcggcatggctgcatcaggcttgcgcccattgtgcaatattccccactgctgcctcccgtaggagtctggaccgtgtctcagttccagtgtggctggtcatcctctcagaccagctagggatcgtcgccttggtgagccgttaccccaccaacaagctaatcccatctgggcacatccgatggcaagaggcccgagggtccccctctttggtcttgcgacgttatgcggtattagctaccgtttccagtagttatccccctccatcaggcagtttcccagacattactcacccgtccgccactcgtcagcgaaacagcaagctgtttcctgttaccgttcgacttgcatgtgttaggcctgccgccagcgttcaatctgagccatgatcaaactcttcaatttaaaagtttgatgctcaaagaattaaacttcgtaatgaattacgtgttcactcttgagacttggtattcatttttcgtcttgcgacgttaagaatccgtatcttcgagtgcccacacagattgtctgataaattgttaaagagcagttgcgacgcggctttcagctcactgtcgcgaggtggcgtatattacgctttcctctttcagagtcaaccctgaatttcaggatttttttctcttcgttgttccgaccatcctgtgaagtgtttcacgttgtcgtctcaacggaggcgcattatagggatcccaattttttgcacaagtatttttttgatctttttttctgtttgttgttttttcaccctttttgctgcaatcgcacacaaaacggtgcttttttgcatactaaaagacttgcacaaggccaataatgcccccaaagtcattagtaaatcatttattgctgaggtaagtatgtctgatgttttacgcccataccgcgatctttttccacaaatcggtcagcgcgtaatgatcgacgatagcagtgtcgtgattggtgacgttcgtctggctgatgatgtggggatctggccgctcgttgtgattcgtggagatgtacattatgtacagatcggagcacgcaccaatatccaggatggcagtatgttgcatgtcactcataaatccagctacaacccagatggcaacccattaaccattggcgaagatgtcactgttggtcacaaggtgatgctccacggctgcaccattggcaatcgagttttggttgggatgggcagtattttacttgatggcgcaatagtagaagatgatgtgatgattggtgcgggtagtctggtcccacaaaataaacggctggagagcggatatctgtatctcggtagccccgtcaaacagatccgcccgttaagtgatgaagagaaggctgggttacgctattccgcgaataattacgtgaaatggaaggacgaatatctggatcagggtaaccagacccagccttgatcatcttcactttgttcctgaattaagttttccgcttcttcttccaggtcccagcgatgctgacgaaaactcgctaaccactgttctggcgtatctccagtaaagcgatacgccagactctcgccagagatcgcgcatgtcagttgcataccattcacgagagcgggaaaacatacacattttttattctcgtcccactcttccctgtccggaaactggatggcctgattcacgcggacaattcctcctgcaattgctttataactggttctacgtcaggcagaacaccgtgccagagaagaaaggcatgagccgcctgtgccaccagcattcctaaaccatcagcattacgcttactgcctcgctgctcacaccatgccagaaaaggagtttttcctttctgatagaacatgtcatagcaataaatgcctggatgaatgaggctactcgggatcgccggaatatcaccactgatgccactggatgttgcattaataatgagatcaaactcatgaccttccagttcgtccatactcaacgcctgaatactgccagtgtgcgcaaacaatttagccaactcttccgcgcgggataccgtccgattagttattgtcaccgcacagtccagggaaaggagtggcagtagtacgccgcgagatgctccaccagcgccgataagcagaatacgtaaaccagggcggataaaagacagacgttccagatcgcttaacaagcctacaccatcggtattgtcacccagcaggcgtccatcttctaaccgcatgagggtattaacagcaccagccaacgctgcccgttcagtaagctcatccgctctggcaaaagcctcttctttaaaaggcaccgtcacattcgcacctttaccaccagcactaaagaaagcgttcagtgtgttgatgaaatcattgatgggtgccaacacgcgcccatagggatgttcaatattcagttgctgagcaaattgctgatgaatgaatgggcttttgctgtgggctatcggattaccaaaaacagcataggtttccattatgttacccctgtcgaaacagttcacccgtcagggcatcgcggatttcactaggatttaaacgcccccccgtttcaccaggcacaaccgggaacgccgcgccaaattgtgcgcgaacttcgtctactgttcgacaaggtggcaatccactcaagttggcactggtagaaaccagcggtttaccataagcctggcacaaagcaaccaccaacggatggtcggtgactcgtacagcaaggctatcaaagcggcccgtcaaccagcgcggtgttgtcgcaggcgcgggaaagacaaaggtgacaggacctggccagcgggaaaaaatggtttcacgctgcacgtcagtcaacatggtgtcatcaatatagggtttaagctgctcgtaatttgctgcgattaaaatcagccccttatcaaccggacgctgttttaactccaacagtcgcatcactgctgtttcgctatcaggatcgcacccaacaccgaaaacggcttccgttggataggcgatgacacgttcttcattgagaacatctatcgcagctgcgatagcgtctctttgcaggttattattcacgttattattccgcgctaaccggctttccacattgtttactggcacaaaagtgttttacaccctgcgcggttttcttttcgatgagtagcggataatgacactcagggcattctccagctatgggtttgaagttaatggcaaattgacactccgggtagcgatcacaagagtgaaatgttttgccataacgggagcggcgctggaccagatggcccgtccgacattgggggcatgtaattgctgtttcgtccggtttatcgataagttcggtatgttcgcattcagggtagttaatgcaaccaataaacataccaaagcgtccctggcgtaataccagatttgcgccacatgcagggcaaacctgcccctccagaactttgacgatatgtccatccgcactagatttcagaggacggacgtagtcacacgccggatactgactgcatccaagaaacggaccgtgtttcccggatcgaataaccagttcagccccgcactttgggcaggactcattattacgcaccgtgaacagtgcacttttcgccataacaacttatgctgaattaaagaaatgattaatgcagcataccttcattcacttcaaagagtaattcttccatttgctggtacgcattttcgcagcccggaatattgaacaacaccatcaggatcacccatttcagatcatccagttcgaactctgcgttatccagcgcgagcactcgctctatcaccatttcacgagtttcaaggttgagcacctgaatctgctcaaggaaaagcagaaacccacggcagctggcatccagtcgttcacactcttccggtgtataaatacgcatggagagaggatcgctggccagttgcatcggttctgccaacccttcctgataatcagcaagtttttccagccatagcagggcattgtagatatcttctcgctcaaaacctgcgtcggtaagatcctgttcaagtttgtcttgatccacacgcaactcagcttctgtgtgaatataggtttcaaacaaatacattagtacgtcgaacatggcatgccctcctcaatcggacatagccgccgggtacagctgcgatccatcctgctaactccagttcgagtagttgagtaactacctctggcacaggttggccggcacgttcagcgacgacgtcaacaggtgttacctcatctcctacgttagccaggagctcaggaaatggcaatgccacgtcttgctgatctggactataaaaactattttcaggggcgtctggcaaccagtgcaatccaaattgcaagttttccagaatttcttccggttccgtcacaagaatcgcaccttgttttattaaccagtgaggcccttcgcttcccggattccctattggacctggcaaggcaaaaacttctcgcccctgctcaagcgcacaacgtgctgtcaccaggctaccactacgcaaagccgcttccaccaccagtacacctttacttagaccactgataatgcgatttcttcgtgggaaattgtaagcaaggggtggaacatcgaggggaaattcgctgacgagagcgcccccctgttcaagcagactggcagccagtcgggcatgacggcggggatgaatggtattaagtccattccccaatacagcaatgctgacgccatttacctgtaaggctgctttatgcgctacaccatcgattccacgcgccagtccactcgtaattgtcactccacgcgtcgccagagtttcgcaaaataatcgtccccatcgctcgccataccaactatgcgcccgactccccactacggcaagctgaaaactatgcagcgcgtgcagttctccttcaacaaacagtgcgccggggtaatctgtcgtcgccagaagttgaggaggataaaattcgctgtccgcaggaattaaatgatggttgggttgctccaaccaacaaagactgctttcgatactctttcgtggaaaactaagaaagcgttgtgcctgccgcaatgtaagccctgtttgctgcaatacaaccgcatcaatatggctctgttttgccacccagtgagcgatacggaccatatcatcgccgtacaagctgctgatactcattaaacgcagccaaatttctgtatcgaccatccttatctccctgccataagcagccttagcaatctttgcgattggtcagtgatgctgtcaatcagagggggatttgtctagaatagaagaaataatctttctaactcctgaacacatctctggagatttatgagtgttttgcaagtgttacatattccggacgagcggcttcgcaaagttgctaaaccggtagaagaagtgaatgcagaaattcagcgtatcgtcgatgatatgttcgagacgatgtacgcagaagaaggtattggcctggcggcaacccaggttgatatccatcaacgtatcattgttattgatgttagcgaaaaccgtgacgaacggctagtgttaatcaatccagagcttttagaaaaaagcggcgaaacaggcattgaagaaggttgcctgagcatccctgaacaacgtgctttagtgccgcgcgcagagaaagttaaaattcgcgcccttgaccgcgacggtaaaccatttgaactggaagcagacggtctgttagccatctgtattcagcatgagatggatcacctggtcggcaaactgtttatggattatctgagtccgctgaaacaacaacgtattcgtcagaaagttgaaaaactggatcgtctgaaagcccgggcttaaggataagaactaacgtgagtgaaagtctacgtattatttttgcgggtacacctgactttgcagcgcgtcatctcgacgcgctgttgtcttctggtcataacgtcgttggcgtgttcacccagccagaccgaccggcaggacgcggtaaaaaactgatgcccagcccggttaaagttctggctgaggaaaaaggtctgcccgtttttcaacctgtttccctgcgtccacaagaaaaccagcaactggtcgccgaactgcaggctgatgttatggtcgtcgtcgcctatggtttaattctgccgaaagcagtgctggagatgccgcgtcttggctgtatcaacgttcatggtagtctgctgccacgctggcgcggtgctgcaccaatccaacgcagtctatgggcgggtgatgcagaaactggtgtgaccattatgcaaatggatgtcggtttagacaccggtgatatgctctataagctctcctgcccgattactgcagaagataccagtggtacgctgtacgacaagctggcagagcttggcccacaagggcttatcaccacgttgaaacaactggcagacggcacggcgaaaccagaagttcaggacgaaactcttgtcacttacgccgagaagttgagtaaagaagaagcgcgtattgactggagtcttagcgcagcacagcttgaacgctgcattcgcgctttcaatccatggccaatgagctggctggaaattgaaggacagccggttaaagtctggaaagcaagcgtcattgatacggcaaccaacgctgcaccaggaacgatccttgaagccaacaaacaaggcattcaggttgcgactggtgatggcatcctgaacctgctcagcttacaacctgcgggtaagaaagcgatgagcgcgcaagacctcctgaactctcgtcgggaatggtttgttccgggcaaccgtctggtctgatagtccactcttctaagcccggtcttgccgggcgtttttatacttatgaaaaaacaacgtaatttacgtagcatggcggcccaggccgttgaacaagtcgtcgagcaagggcaaagtttaagcaacattctgccaccgctccagcaaaaagtttccgataaagacaaagcacttcttcaagagttgtgctttggcgtactgcgtacgcttagccagttagactggctgattaataagttaatggcccgtccgatgaccggcaaacagcggaccgtgcattacctgattatggttggtttgtatcaactgctttatacccgcattccacctcatgctgcgctggctgaaacggttgaaggcgctatcgcaattaagcgtccgcaacttaaagggttgataaacggtgtattacgccagttccagcgtcagcaagaagagttattagccgagtttaatgccagtgatgcacgttatctgcatccttcctggttgctgaagcgtctgcaaaaagcgtatccagagcagtggcaatccatcgtcgaagccaataaccagcgtccgccaatgtggctgcgtattaatcgtacgcatcattcccgcgacagctggcttgcattgctggatgaagcaggaatgaaaggtttcccgcatgcggattaccctgatgctgtacgtctggaaacacctgcacctgttcatgcgctacctggttttgaagacggatgggttaccgttcaggatgcaagtgcacaaggttgcatgacctggcttgcgccacaaaacggtgaacacattttggatctttgtgccgcccccggcggtaaaacaacgcatatccttgaggtggcaccagaagcgcaggttgttgcggttgatatcgacgaacagcgcctctctcgggtttacgacaatttaaaacgccttggtatgaaggcgaccgtgaaacaaggtgatggccgttacccttctcaatggtgtggcgagcaacagtttgatcgcattttattagatgcgccttgtagtgcaaccggtgtgattcgtcgccatccagatattaaatggttacgtcgcgatcgcgatatcccggaactcgcgcaattgcagtctgaaattctcgacgccatttggccgcatttaaaaaccggtggaactctggtctatgccacctgtagcgtgttaccggaagagaatagcctgcagattaaagcctttttgcaacgtaccgctgatgccgaactttgcgaaacaggaacaccagagcaaccgggtaaacaaaatctacctggtgccgaagagggcgacggcttcttttacgctaagctaatcaaaaagtgatgagataacgggtcgcgactgatgaaaattatcattctgggtgccggccaggttggcggcacactggcggaaaacctggttggcgagaacaacgatattactgttgtcgataccaacggtgagcgtctgcggaccttacaggataaatttgacctgcgggtcgtgcaggggcatggctctcatccacgcgtattgcgggaggcaggtgccgacgacgccgatatgctggttgctgtaaccagtagtgatgaaaccaatatggttgcctgccaggtagcctacagtcttttcaacacccctaatcgcatcgctcgtatccgcagtccagactacgtgcgcgatgccgataagctatttcatagtgatgctgtgccgattgatcatctgatcgcaccagagcagttggttatcgataatatttaccgactgattgagtatcccggcgcattgcaggtggtgaacttcgctgagggtaaagtcagcctggctgtggttaaagcctattatggcggcccgctgattggtaatgcacttagcaccatgcgcgaacatatgccacatatcgatactcgtgtggcagcaattttccgccacgatcgccccattcgtccgcaaggtagcaccattgttgaagctggtgatgaagtgttctttattgccgctagtcagcatatccgcgcggtgatgagtgaattacagcgactggaaaaaccgtataagcggatcatgctggttggtggcggtaatatcggtgcagggctggcgcgtcgtctggaaaaagattacagcgttaaactcatcgaacgtaatcagcagcgcgctgccgaactggcggaaaagttacagaatacgatcgtcttttttggtgatgcgagcgatcaagaactactggccgaagaacatatcgatcaagttgatctgtttattgccgtcaccaacgatgacgaggccaatatcatgtccgccatgcttgccaaacgtatgggtgcgaaaaaggtgatggtattgatccagcgtcgcgcttatgtggatctggttcaggggagcgttatcgatattgcgattagtccacaacaagcaactatttctgcgttgcttagccatgtgcgaaaagcagatattgttggtgtttccagtttgcgccgcggcgtagcagaagctattgaagccgttgctcacggtgatgaaagcaccagtcgcgttgtcggcagagtcattgacgaaatcaagctaccgccaggaacgattattggagcggtggtacgtggaaacgacgtgatgattgccaatgacaatctgcgcattgagcaaggcgatcacgtaattatgttcctcacagataaaaagtttattaccgacgtcgaaagactcttccagccaagccctttcttcttgtaattaataaggcgtctaatgacgccttattatttccctttgattatcaaggattaattaaattcattcctggcaggaaaatggcttaacatttgttagacttatggttgtcggcttcatagggagaataacatgagcattattaaagaatttcgcgaatttgcgatgcgcgggaacgtggtggatttggcggtgggtgtcattatcggtgcggcattcgggaagattgtctctagtctggttgccgatatcatcatgcctcctctgggcttattaattggcgggatcgattttaaacagtttgctgtcacgctacgcgatgcgcagggggatatccctgctgttgtgatgcattacggtgtcttcattcaaaacgtctttgattttctgattgtggcctttgccatctttatggcgattaagctaatcaacaaactgaatcggaaaaaagaagaaccagcagccgcacctgcaccaactaaagaagaagtattactgacagaaattcgtgatttgctgaaagagcagaataaccgctcttaacaagcgccactaagcagaagaccagtggtaaaaaagtgatttactttcttgccactggcctcccagttcccccgattgccatgttttccttttcgcatgtaactgcctttccccttcttatttttctctacgcgctgtcggaataagggatcatgtagtaatgcttctatcgcattatcctttatctgccctttagtatgctgatatcgactcataaaaactccagttggttatttaacggcgcgagtgtaatcctgccagtgcaaaaaatcaacaaccactcttaacgccactcgccccttgttcaagagcttcaagaatgctacaataaacactgctatgagcagtcccacaacaggcatcgttaaggcgttgcaaggaacgctgcatactctgcaactcggctatccgtgcttcgacttcctgcaatctttcctgcacaatgcctttactctcctgacaggtatggtgttcaggatcgatgcggatgctcagcaactcgcggatgctctccagactgaaacctagttgtctggcatggcggataaatttcaatcgctggagatcgctttcggtatataggcgaaacccaccttcagtacgcacttcatgctccatcatctgctgtttttcgtaataacgaatcgtgtcgggtgttacttccgccatttttgccagctcaccaatgcgatacatacatactccattagttatcgttgattttgtccaacaacttgtcagcataatcgccgcgtaaaaaatcggtactcaatccagcttgtcgcagcttcaattccagtaaactcaatcgacggctaacctcttgatattgcggatcatcgtgacggatacctttgagaatatccagaagctgaattgcttctctccgttgctcaagttctggcggtaagcaaccggcattcttcagcaagcgataccccgcacgtaattccggtggcacgtgagaatcatcatccagtatcaatggttcgccgctacctgccaggttatcaaactcacctttcgcttgcgcttctgctatatggcgctctgcccactggtcaagtaaccacataaatactccaggggatgaacaaaaagagtacagctattgtagataagtggggatactacgggtataaaaaaacccgccggggcgggtttttttacgttgcttcagattactctgcagcagcttctgctttctcactacgatcaaccagctcgatgtaagccatcggcgcgttgtcgcctgcacggaagccacacttcagaatacgagtgtaaccaccggcacggctcgcgaaacgcgggcccagttcgttaaacagttttgccacgatctcgttatcacgagtacgggcgaatgccagacgacgattagcaacgctatcagtcttggcaagagtaatcagcggctcaactacgcggcgcagctctttcgctttaggcagagtcgtcttgatgatttcatgacgaaccagactacctgccatattgcggaacatagcctggcgatggctgctgttgcggttcagttgacgaccactcttacgatggcgcatgaccttatccttctcagtaaaaccttaacctgtgatccggttactcgtcagcgatgcttgccggtggccagttttccaggcgcatgcccagagacagtccacgggaagccagcacgtctttaatctcagtaagagattttttaccaaggttaggcgttttaaggagctcaacctcggtacgctgtaccagatcaccgatatagtggatagcttctgctttaaggcagttagcagagcggacagtcaattccagatcgtcaacagggcgcagcaggatcggatcgaactctggtttctcttctttcacttcaggctgacgtacatcacgtaagtcaacgaaagcttccagttgttcagccagaatggttgccgcacgacgaatcgcctcttcaggatcgattgtgccgttggtttccatttcgatgaccagcttgtccaggtcggtacgctgttctacacgcgctgcttcaacattgtaggcaatacgctccacagggctgtagcatgcgtcgaccagcagacggccgattgggcgctcatcttcttcgctatgaattcgggtagaagccggcacataaccacgaccgcgctgaactttgatacgcatgctaatagacgcgttctcatcggtcaggtggcagatcacgtgctgcggcttgacgatttcgacatcaccgtcgtgggtgatatcggctgcagtcacagggccaatgccagatttattcaaggtaagaataacttcatctttgccctgaactctcaccgccagccctttcaggttgagcaggatttccaggatatcttcctgaacgccttctttggtgctgtactcatgtagtacaccatcaatctcaacctcggtcaccgcgcaacccggcatgctactgagcagaatacggcgcagtgcgttacccagagtatggccaaagccacgctctaaaggctcaagggtcaccttggcgtgcgtgctactcacttgctcgatatcaaccaggcgcggttttagaaactctgtcacagaaccctgcattgtgtcctctctttggtactaagctttacttggagtaaagctcgacgatcaggtgttcgttaatgtccgcagacagatcagaacgctccggcttacgcttaaacgtaccttccatcttgccagcatcaacttccagccaggttggcttttcacgctgctcagccagctccagagcggctttcacgcgagactgcttcttcgctttctcacgaatgcttacaacgtcattcggactaacctgataagaagcgatgttaacaacacgaccgtttaccataattgctttatggctaaccagctgacgtgcttctgcacgagtggcaccgaagcccatacggtatacaacgttgtccagacgaccttccagcagagccaacaggttttcaccggtgttgcctttcagacgtgctgcttctttgtagtagttacggaactgacgctccagcacaccatagatacggcgaactttttgcttttcacgcaactgcacaccatagtcagacagacgcggtttacgcgcaccgtgctggccaggagcttgttcaattttacacttggtatcgatcgcgcgaacgccagacttaaggaataagtcggtgccctcacgacggctcagcttgagcttaggacccaaatatcttgccattttctttctccaacaaacctggaaaacgaggcgttatacgcgacgttttttcggcggacgacaaccgttatgagggatcggagtcacatcagtaatgttagtgatgcggaaacctgcggcgttcagagcacgaatagtagattcgcggcctggacccggacctttaaccataacttccagattcttgatgccgtattctttcacggcgtcagcgcaacgctctgctgcaacctgagctgcaaacggagtggatttgcgagaaccacggaaaccggaaccaccggctgttgcccaacccaacgcgttaccctgacgatcagtgatagtcacgatggtgttgttgaaagaagcatggatatgagccacgccgtcagagacttgttttcttacacgtttacgtgcacgaattggtgcctttgccattattcaatcaccccgattatttcttgatcggtttgcgcggacccttacgggtacgtgcgttggtcttggtacgctgaccgcgaaccgggagaccacgacgatgacgcaaaccgcgatagcaaccaagatccatcaggcgcttgatgctcatgctgatttcacggcgcagatcaccttcaacgacaaatttggcaacttcgtcacgcagcgtgtcgatttgtccttcagacagctcactgatcttaacatcttcagcgatacccgctgcagccaggatggctttagaacgggtcttgccgacgccataaatgctagttaatgcgattacggcatgcttatgatcaggaatgttaatgcctgctatacgggccactatgcactcctactatttaatatgtacgttccatgctgaaaagcccgttttcaggatactcaaatggaaacgcacagacatacaaaagattggctggctaatctagccagctcaacccaactttgcaagaaaaatatgcgaaaaaatcagccttggcgctgtttatgcttcggctcggcactgcaaatcacacggatgacaccatcacgcttaacgattttgcagttacggcataatttcttgacggaagcacgaactttcatttttactctccgtaacttctcgggcgaccaattatcggccgtagcctttcaggttcgccttcttcaatgcagactcatactgactggacatcatcagagtttgcacttgagccataaagtccataatcacgacaacaacgataagcagactggtcccaccgaagtagaacggtactttcattgcatcacgcatgaactccgggatcaggcagataaaggtaatatacagcgcaccaaccagggtcaggcgggtcattactttatcgatatacttcgccgtttgctctcccggacgaattcctggtacaaatgcaccggacttcttcaggttatctgctgtttcacgcgggttgaaaaccaacgccgtgtagaagaaacagaagaagatgattgcagacgcatagagtaacacataaagcggttgcccaggctgcaaatacaggctaattgttgtcagccagttccaaccagtaccgcccccgaaccaactcgcgatggtcgccgggaacagaataatactggaagcgaagattgccgggattacccccgccatattcactttcagcggtaaatgtgtgctctgtgcagcatagacacgacgaccttgctgacgtttcgcgtagtttaccacaatgcggcgttgaccacgctcaacaaatacaacaaagaacgtcactgcaaatactaatactgcaaccaacagcaacacgaggaagtgcaggtcgccttgacgcgcttgctcgatagtatgggcaatggctggcgggagtcccgcgacaataccggcgaagataatgatactaataccgttgccgatacctcgttcagtaatctgttcgcccaaccacatcaggaacatggttcctgtgaccagacttacaacagcggtgaagtagaatgcaaagcccgggttaatcaccaggccttgcataccaggcatattcggcagaccggtagcaataccgatgctctggaatattgccagcaccagagtaccgtagcgggtgtactggctgatcttacgacgaccagactccccttctttcttaatttctgccaacgttgggtgaaccaccgtcagcagctggataatgatgctcgcgctaatatacggcatgatccccagagcaaagatagaagcacggctgagagcaccaccagagaacatgttaaacatctcaatgatggtgcctcgctgttgctcaagcagtttggcaagtacagcggcatcaataccagggatcggaataaaagagccaatacggaacacaatcagcgcaccgataacaaacagcagtctgcgtttcagctcgcctaagccacctttggcactttgaaaatctaatcccggttgtttagccatctgctacttattcctcgattttaccgccagcagcttcgatagcagcacgagcgcctttagtaacacgcaggccacgaacagttaccggagtcgttacttcgccagccaggatcactttcgcgaactcgatctggataccgataatgttagccgctttcagcgtgttcaggtctactacaccgccttctactttagccaggtcagacagacgaatttcggctgtaatcgctgctttacgagaagtgaagccgaatttcggcagacgacggtacagaggcatctgaccaccctcgaaaccgcgacgtacgccaccgccagaacgagacttctgacctttgtgaccacgaccaccggttttaccgaggccagaaccgataccacgacccaggcgtttacccgcctttttggagccttcggccggagacagagtatttaaacgcatctcttactcctcaactttaaccatgaaggaaaccgcgttgatcataccgcgaatagcaggagtatcctcgcgctctacggtgtgaccaatacgacgcagacccaggccaagcagcgttgccttgtgtttcggcagacgaccgattgcactgcgggtttgagtaattttaatagtctttgccatggtttatttccccagaatttcttcaacggatttaccacgcttggcagcgaccatttctggagaattcatattttccaggccatcaatagttgcacgaaccacgttgatcgggttggtggaaccataggctttagccagaacgttatgaaccccagcgacttccagaacggcgcgcattgcaccaccggcgatgataccggtaccttcggaagccggctgcatgaatacgcgagaacccgtgtgaacacctttaacagggtgttgcagagtgccgttattcagcgcgacgttaatcatattgcgacgggctttttccatcgctttctggatcgctgctggaacttcacgcgctttaccgtaaccaaaaccaacgcgaccgttaccatcgccaactacagtcagagctgtgaaggagaaaatacgaccacctttaacggttttagatacgcggtttaccgcgatcagcttttcctgcagttcgccagcttgtttttcgatgtgagccatcttacacctctaccttagaactgaaggccagcttcacgggcagcatctgccagtgcctggacacgaccatgatattggaacccggaacggtcaaaggatacatctttgatgcctttttccagagcgcgttcagcgacagctttacccacagctgcagccgcgtctttgttaccggtgtacttcagttgttcagcgatagctttttctacagtagaagcagctaccagaacttcagaaccgttcggtgcaattacctgtgcgtaaatgtgacgcggggtacgatgtaccaccaggcgagttgcgcccagctcctggagcttgcggcgtgcgcgggtcgcacgacggatacgagcagatttcttatccatagtgttaccttacttcttcttagcctctttggtacgcacgacttcgtcggcgtaacgaacacccttgcctttataaggctcaggacgacggtaggcgcgcagatccgctgcaacctggccgatcacctgcttatcagcgcctttcagcacgatttcagtctgagtcggacattcagcagtgatacccgcaggcagctgatggtcaacaggatgagagaaacccagagacaggttaatcacattgcctttaaccgctgcacggtaacctacaccaaccagctgcagcttcttagtgaagccttcggtaacaccgataaccatactgttcagcagggcacgcgcggtaccagcctgtgcccaaccgtctgcgtaaccatcacgcggaccgaaggtcagggtattatctgcatgtttaacttcaacagcatcgttgagagtacgagtcagctcgccgtttttacctttgatcgtaataacctgaccgttgatttttacgtcaacgccggcaggaacaacgaccggtgctttagcaacacgagacattttttcctccgattaggctacgtagcagataatttcgccaccaagaccagcctggcgcgctgcacgatcagtcataacacctttagaggtagaaacaactgcgatacccagacccgccataactttcggcagctcatctttacgtttatagatgcgcagacctgggcggctgacacgctgaatgctttctacaacagctttgccctggaaatacttcagagtaagttccagttcaggcttggtgtcgccttcaactttaaaatcttcaataaaaccttcttccttcagcacgttggcgattgccactttcagcttggaggaaggcatggtgaccgcagctttgttcgcggcctgaccgttacggatacgggtcagcatatccgcgatcggatcttgcatgctcatctgtctttactcccgtgattcaattggtgacaattaccagctagcctttttcagacccgggatttcaccgcgcatagcggcttcacggaccttaatacggctcaacccgaacttccgcaggaaaccatgcggacgacctgtttgacggcagcggttacgctgacgagacgggctggaatcacgcggcagagtctgcagcttgagaacagcgttccaacgatcttcgtcggaagcgttcacatcagagatgatcgctttcagttcagcgcgtttcgcgaagtatttatcagctaaagctacgcgttttacttcgcgtgctttcatactttgcttagccatttagtaaccctaccttacttgcggaacgggaagtcaaaggcagccagcagagcgcggccttcttcgtcagatttcgcagtagtggtaatggtaatatccaaaccacgaacgcggtcgactttatcgtagtcgatttctgggaagatgatctgctcacggacacccatgctgtagttaccacgaccgtcgaaagacttagcggacaggccacggaagtcacggatacgaggtacagcaatagtgatcaggcgctcaaagaactcccacatgcgttcgccacgcagagttactttacagccgatcggatagccctgacggattttgaagcctgcaacagatttgcgtgctttggtgatcagcggtttttgaccggagattgctgccaggtctgctgctgcgttatccagcagttttttgtcagcgatcgcttcaccaacacccatgttcagggtgatcttctcgacccgagggacttgcatgacagaattgtagttaaactcagtcatgagttttttaactacttcgtctttgtagtaatcatgcagtttcgccatcgtactactccaaattacttgatagtttcgctgttagacttgaagaaacggacttttttaccgtcttcgaatctaaagcctacacggtcagccttgccggttgccgcattgaagattgctacgttggaaacctgaatagcggcttctttttcaacgatgccacccggttggttcagggccggaaccggcttctgatgtttcttaaccaggttgataccttcaacaatgaccttgccggaagacaggacattcttaactttaccgcgtttacctttatctttaccggttaacacgataacttcgtcatcacgacggattttcgctgccatgattcgctccttagagtacttctggtgccagagagataattttcatgaacttctcactacgaagctcacgagttaccggcccaaaaatacgcgtaccgataggctgctcgctgttgttgttcagaagaacacaagcattaccatcgaagcgaatgacagaaccgtccgggcgacgaacacccttcttggtgcgcaccactaccgccttcagcacatcaccttttttgaccttaccacgcggaattgcttctttgatggtgatcttgatgatgtcgcctacgcctgcgtagcgacggtggctgccacccagaaccttgatacacattacgcgacgtgcaccggagttgtcggcgacgttcagcatagtctgttcttggatcattttagtgctccgctaatgtcaactactactgagacccgaaaatcaggtcgttaaaaatccccatatcgagggcgcggcattataacaccgcttcaaggatatgggtagaaaaaataaacggctcatttctgagccgtttattcgtattgagagagtgtactgtattacagaaccgctttctctacaacgcgaaccagcgtccaggatttagtcttggacagcggacggcattcgcggatttcaaccacgtcaccgataccgcattcgttgttctcgtcatgtacgtgcagtttggtcgtacgcttgatgaatttaccgtagatcgggtgtttcacaaaacgttcgatagcaacaacaatggatttctccattttgtcgctaacaacgcgaccttgcagagtacggattttatcggtcattacgcacccgccttctcgttcagtaaagtcttaacgcgtgcgacatcgcgacgcacttgcttcaacaggtgagactgttgcagctggccacttgcagcctgcatacgcaggttgaactgctcacgcagcaggttcagcagctcggtgttcagctcttcaacgctcttctcacgcagctcttttgctttcattacatcaccgtcttagttacaaaggtggttttaatcggcagtttcgctgctgccagcttgaatgcttcacgggccagctcttccggaacaccgtccatttcatacaggactttacccggctgaatcaaggcaacccaatactccacgttacctttacctttacccatacgcactgccagcggcttttcagtgatcggtttgtccgggaacacacggatccagatcttaccttgacgcttaactgcacgggtcatagcacgacgtgctgcttcgatctgacgggcagtcagacgaccacggccaacagctttcagaccgaagctgccgaagctaacatccgtaccctgcgccagaccgcggttacggcctttgtgcattttacggaattttgtacgctttggttgtaacatcagcgacgctccttatttacggcctttacgctgctgctttttaggctgagcagccggtttttccggttgttcaacagcagccataccacccaggatctcgcctttgaagatccacactttaacgccgattacaccgtaagtggtgtgcgcttcagaggtgttgtagtcgatgtcagcacgcagagtgtgcagcggtacgcgaccttcgcggtaccattcggtacgtgcgatttccgcgccgcccagacggccgctaacttcaactttaatacctttagcgcccagacgcattgcgttctgtacagcacgcttcatagcacgacggaacataacgcgacgttccagctgagaagtgatgctgtcagcaaccagttttgcgtccagttcaggcttacgaacttcggcgatgttgatctgtgcaggaacgccagcgatgtccgctacgaccttacgcagtttttctacgtcttcaccttttttaccgataacgatacccgggcgagcagtgtgaatggttacacggatgctcttagccggacgctcgataacgatacgagatacggacgctttagccagttccttagtcaggtactgacgtactttaaaatcgctgtccaggttgtcagcgaattctttggtgttcgcaaaccaggtagagttccatggttttacaatacccaggcgaataccattaggatgtactttctgacccattgctagtctccagagtctcagcgatcggacacaaccacagtgatgtggctggtgcgcttcaggatgcgatctgcacgaccttttgcacgcggcataatgcgcttcatgctcgggccttcgtctacgaaaattttcgtaactttcagatcgtcaatgtcagcgccatcgttgtgttcagcgttagcaatggcagattccagaactttcttgaccagtacagccgctttcttgttggtgtaggtcaaaatatccagagcctggctcactttcttaccgcgaatcaggtcagcaacaaggcgaaccttctgagcagaagaacgagcatggcgatgtttagcgatagtttccatctcttcctcctaccttatttcttcttcgcttttttatcagcagcgtggccgcgataagtacgagtcggtgcgaattcacccagtttgtgaccaaccatttcgtcggttacaaataccggaacgtgctgacgaccattatggacagcgatggtcaaaccgatcatgttaggaaagatcgtactacgacgggaccaagtgcgcaggggcttcttgtctccgctttccaccgctttctctaccttcttcagcaagtgcaggtcaataaaaggacctttcttgagagaacgtggcatggcttatcctctaaaattatttgctacggcgacgtacgatgaatttatcagtacgcttgttgctgcgggtcttcttacctttggtctgaacgccccacggagttaccgggtgcttaccaaagttacgaccttcaccaccaccatgtgggtggtctaccgggttcatcgcggtaccgcgaacggtcggacgaacaccacgccagcgtgcagcacctgctttacccagaacgcgcagcatatgctcagcattgccaacttcgcccagagttgcacggcagtctgcttctactttacgcatttcaccagaacgcagacgcagggtgacataagcaccatcacgagcaacgatctgaacgtaagtaccagcggaacgtgccagctgaccgcctttacctggtttcatttctacgttatgaacagtagaaccaaccgggatgttgcgcatcggcagggtgttacctggtttgattgcagcatcaacgccagactgaatctggtcgccagctttcaggcctttaggggccaggatgtaacggcgttcaccgtctttgtacagaaccagcgcgatgttcgcggaacggttcggatcgtactcaagacgttcaacaactgccgggataccgtctttgttgcgtttgaagtcaacaatacggtaagcctgcttgtggccaccaccgatatgacgagtggtgatacggccattgttgttacgaccaccggatttgctgtttttttccagcaacggagcaaaaggtttgcccttgtgcagctcagggttaaccactttaactacgtggcgacgacccggagatgtcggtttacatttaacaactgccattgtattactcctccgacttactcagcgccgccaacgaagtccagattctggccttctttcagggtgacgtaagcttttttccagtcgctacgacgaccgatacgctgtccgtgacgtttaactttccctttaactaccagggtgttaacgacttcgacttcgacttcaaacagtttctgcacagcagctttgatttctgctttggtcgcgtctttagcaactttgagtacgatggtgttggatttttccatcgcagtagacgctttttcagaaacgtgcggtgcacgcagcaccttcagcagacgttcttcacgaatcatgccagcatctcctcaacttgcttaacagcatcagcagtcattacgactttgtcgaaggcgatcaggctaaccgggtcgataccagttgcatcgcgtacgtcaaccttgtgcaggttgcgcgcagccaggaacaggttttcgtccagctcaccggtgatgatcagcacatcttccagagccatgtctttcagtttctgtgccagcagcttagttttcggcgcttctacagagaacttctcgacaacgatcagacgatcctgacgtaccagttcggacaggatgcttttcagcgcgccgcggtacatcttcttgttaactttttgactgtggtcctgcggacgagcagcaaaggtcacgccaccagaacgccagatcgggctcttgatagaaccagaacgcgcacggccggtgcctttctggcgccacggttttttaccggaaccagttacttcagcacgagtcttctgagcacgagtaccctgacgagcaccagctgcataagcaacaacaacctggtgaaccagcgcttcgttgaaatcacgaccgaaggtagtttcggaaacagtcagcgcgctctgcgcgtctttcaatactaattccattgctatctccttacgccttcacagctggtttaacgatcaggtcgctaccggttgcacccgggacagcacctttaaccagcagcaggttgcgctcagcgtcaacgcgtactacgtcaaggctctgaacggttacacgttcgttacccatctgacctgccattttcttgcctttgaacactttgcccggagtctggttctgaccgatagaacccggaacgcggtgagacaaggagttaccgtgagtagcgtcctgggtacggaagttccagcgcttaacggtacctgcgaaacctttacctttagaggtgccagttacgtcaacttttttaacgtcagcaaacagttcaacgctaatgctctgacctacagtgaactcttcgccttcagccaggcggaattcccacagaccacggccagcttctacgccagctttagcgaagtggccagcttcaggcttggtcacacggttagcttttttagcaccggtggtcacctgaatagcacggtagccatcgttagccaggtctttaacctgagtaacgcggtttgcttcaacttcgattacggttactgggatagaaacgccgtcttctgtgaagatacgggtcatacccacttttttaccgactaaaccaatcattgtttcaacctctcaatcgctcaatgacctgattaacccaggctgatctgcacgtctacaccggcagccagatccagacgcatcagagcatcaacggttttctcggttggctcaacgatgtcaaccagacgcaagtgagtacggatttcgtactgatcgcgcgcgtctttgttgacgtgcggggagatcagaacagtgaagcgctctttgcgtgtcggcagcgggatcggaccacggacctgcgcaccagtgcgcttggcagtctcgacgatttccgcggttgcttgatcgatcagacgatgatcaaacgctttcaggcggatacggattctttggttctgcatgagaccagagctccaattattttataaacgaaaatgattactcctcagacccattacgattgatgggagagtgtaaccgttcttacgtagctccccgattgggagcattgttaggtagccaaattcggctaactgaggttcagattgaacctgctgtcaactacgacaagcccgcgcattatacatacttaaccaccgaacgcaagcgtattgctagtaaagtaaacagccttcgggttatctctcaagttcgttcagtgcatttttgacacgctctcttaaaccggctttctcttcgctttcttccacagtattttcttcgtcttcagaagaagagggggcattctcaaccgcgacgcctgggtcatcttcctcctcgacggattcgacgacggggagtggctgttttttgaagaaatagtgttgtgtactttgtttaaaagcgggcgtttcagcctctacagtgacttcggcttttactatccaaagcacccatagctgcctggcatacccaccaaccagcaccattcctgcaaaccacaggcaaatcagtaataaacaaattacatatattatggtgctgtgtttttgtcgggagaagataccagggtgacctgtttctttctgctcacgcgcggcgatatagaattcaaacattataatcccttgtgacgtaaaaactgcaaaacaaaagtcctacgcaggaattatttacgttttacgagaacccttcaatatgaattaaattacggcattaaaaataagaaaaaagcctgacaaatgaagcattttaaaaacagaaacattcatatttaaaatgttaaattgaattgatattttaaatatgaataatttattcgttctgacagtacgaataagatatgccgtcaacaaatgcaaaaagggcgccgaagcgcccttttcaattcaaaactaattaacgtgtaattagcccagaactttagcaacaacgcccgcgccaacggtacggccgccttcacggattgcgaaacgcagaccgtcgtccatcgcgatcgggtggatcagggtaacaaccattttgatgttgtcgcccggcattaccatctctacgccttccggcagttcgatggtaccagtcacgtcagtagtacggaagtagaactgcggacggtagcctttgaagaacggagtatgacggccgccttcatctttggacagaatgtacacttcagattcgaacttggtgtgcggcttgatggtgcccggcttagccagtacctgaccacgttcgatttcttcacgtttgataccacgcagcagaacacctacgttctcaccagcacggccttcgtccagcagtttgcggaacatttcaacgccagtacaggtagacttctgagtctctttgataccaacgatttcaacttcttcaccaactttgatgataccgcgttctacacgaccggtaacaacggtaccacgaccggagatggagaatacgtcttcgatcggcagcaggaacggcttgtcaatcgcacgctctggttccggaatataagaatccaggaagccagccagttccaggattttcgcttcccactctgcgtcgccttccagcgctttcagagcagaaccacgaacgatcggagtgtcgtcgcccgggaagtcgtactgagacagaagttcacgaacttccatttcaaccagttccagcagctcttcgtcatcaaccatgtcgcatttgttcaggaacacgatgatgtacggaacgcctacctgacgacccagcaggatgtgctcacgagtctgcggcatcgggccgtcagtcgcagcaactaccaggatcgcgccgtccatctgagcagcaccggtgatcatgtttttaacatagtcggcgtgccccgggcagtctacgtgtgcgtagtgacgggtcggggtgtcgtattcaacgtgagaagtgttgatggtgataccacgagctttttcttccggcgcgttatcgatctggtcgaatgcacgagcagcaccgccgtaggttttagccagtacggtggtgattgcagcggtcagagtagttttaccgtggtcaacgtggccgatagtaccaacgttaacgtgcggttttgtacgttcaaatttttctttagacacggctatattccttactatagtgctctccccttcaggagagagcacgggactttggtattaacccttaggcttatttaccacgggcttcaattacggcctgagcaacgttactcggcgcttcatcatacttcaggaattccatagtgtaacttgcacgacctttggtcagagaacgcagctgagttgcgtatccgaacatttcagacagcggtacttcagcgtggatcttaacgccagtaacttcagattcctgacctttgagcataccacgacgacggctcaagtcaccgataacgtcaccggtgttctcttccggagtttctacttcaaccttcatgatcggctcaagcagaactggtttcgctttcttaaagccttctttaaaggcgatagaagcagccagtttaaacgccagttcagaggagtcaacgtcatggtaagaaccgaagtgcagacgaatacccatgtctactaccgggtagcctgccagcggacctgctttcagctgttcctggatacctttatcaacggccgggatgtattcgccagggattacaccacctttaatgtcgttgatgaactcgtagcctttcgggttactacccggctccagcgggtacatgtcgataacaacatgaccatactgaccacgaccaccagactgtttcgcgtgtttaccttcaacatcggtaactttctggcggatagtttcacggtaagcaacctgcggtttacctacgttcgcttcaacgttgaattcacgcttcatacggtcaacgatgatgtcgaggtgcagttcgcccatacccgcgatgatggtctggttagattcttcgtcagtccatacacggaaagacgggtcttctttagccagacggcccagagccagacccattttttcctggtcagctttggttttcggttcaactgcgatggagattaccggctcagggaattccatacgttccagaatgatcggcgcatccgggtcacacagggtgtcaccagtggttacgtctttcagaccgatagcagcagcgatgtcgcccgcgcgaacttctttgatctcttcacgtttgttagcgtgcatctgaacgatacgaccgaaacgctcacgtgcagctttcacggagttcagtacggtatcaccagagttaaccacaccggagtaaacacggaagaaggtcaggttaccaacaaacgggtcggtagcgattttgaacgccagtgcagagaacggctcgtcatcacttgcgtgacgttcagccggagtgtctttaccgtcgtccaggataccgttgatcgcaggtacgtcaaccggggatggcaggtaatcaattaccgcatccagcatcgcctgaacacctttgttcttgaacgcagaaccacaggttaccaggatgatttcgttgttcagaacgcgctgacgcagagcacctttgatttctgcttcagtcagttcttcaccacccaggtatttttccatcagctcttcagaagcttcagctgcggattcgatcaggttctggtgccattcgttagccagttcaaccatgtctgccgggatatcttcgtattcgaaggttacgccctggtcagcgtcgttccagttgatagctttcattttcaccaggtcaacaacaccggtgaaatgttcttcagcaccaatcgccagctgcagcggaaccgggttcgcgcccagacgggttttgatctggttaacaactttcaggaagttcgcacccatgcggtccattttgttaacgaacgcaatgcgcggaactttatatttgtttgcctgacgccatacggtttcagactgcggctgaacaccaccaactgcgcagtaaaccattaccgcaccatcgagaacacgcatggaacgttctacttcgattgtgaagtcaacgtgccccggggtgtcgatgatgttgatgcgatgcggctcatactgcttagccataccagaccagaatgcagtagtcgcagcggaagtgatggtaataccacgttcctgctcctgctccatccagtccatggttgcagcgccgtcatgaacttcaccgattttatggtttacaccggtgtagaacagaatacgttcggtagtagtggttttaccggcgtcgatgtgcgcactgataccgatgttacggtagcgtgcgatgggtgttgtacgagccatttgtttcctcgtttatcttttaggcgttcaatttaagtagcccaaagcgggctgcttactggaagcgcccgcctggtgactaaaactccgaagggataaccaacggtagtgtgcgaacgccttgttggcttcggccatacggtgaacgtcttcacgtttcttaactgcagtacctttgttttctgcagcatcagaaagttcgttcgccaggcgcagagccatggatttatcaccgcgtttacgagcagcttcaacgatccaacgcattgccagagcattacgacgaaccggacggacttcaactggtacctgataagtagaaccaccaacgcggcgagacttaacttctacagtcgggcgcacgttttcgagagctacttcgaatgcttccagttcagatttaccagagcgctgagccagggtctccagcgcgctgtatacgatagattcagcagtagattttttaccatctaccatcaggatatttacaaatttagccagcagttcacttccgaacttcggatccggcagaattttacgctgaccaatgacgcgacgacgtggcatggaaatactccgttgttaattcaggattgtccaaaactctacgagtttagtttgacatttaagttaaaacgtttggccttacttaacggagaaccattaagccttaggacgcttcacgccatacttggaacgagcctgcttacggtctttaacgccggagcagtcaagcgcaccacgtacggtgtggtaacgaacacccgggaggtctttaacacgaccgccacggatcaggatcacggagtgctcctgcaggttgtgaccttcaccaccgatgtaggaagtcacttcgaaaccgttagtcagacgaacacggcatactttacgcagcgcggagttcggtttacgaggagtggtagtatatacacgagtacatacgccacgtttttgcgggcatgcttccagcgcaggcacgttgcttttcgcaactttgcgagcacgtggtttgcgtaccagctggttaactgttgccattaaatagctcctggttttagcttttgcttcgtaaacacgtaataaaacgtcctcacacaatatgaggacgccgaattttagggcgatgccgaaaaggtgtcaagaaatatacaacgatcccgccatcaccaggccatctggctggggtgcttaaccgtaagtctgacgaaatcagtatagtcaatgagaatgatgtcgttgctaatttgaccagtcaaaccgcgggcaataaggtcttcgttcagggcatagaccttaatgggggcattacgcagactttcaaggtagcggttaccgtcaactgcggcagttacgccatcttgcaataatagcagttcgtctccttcactgagcagacgcagcagcgcagcaaaatccgtcagccagggactgcgatgtaatgtgtgcagcataaacgcctcaaaacctcaaaataacatcgtagttggcgagttcgcggcgtaaggcatctgcttcgagcggcgtggcttcgacaacaaagggtgtctgcggatctaacccgcgttcgcgcagactagccgcacaaacccagcactgttcaatgtcgtacagacccaacaatttaaaagtggcaatgtaatcacgcgccagcactgcatcgggcttttgtcctggcagcagctgaaaaacgccatcagctataaagaagacagccagatcgtcagttaatgcggaagttgccagtaaagcatctaaaccttcccggcctgcggctgtaccatgaggtgcagtagaaaaaacaaacgcaattcgtttcatcagaactgtaccaccctgtcacaggtcaggctggcttccgccagcgccccaagtccgcttaaggtaaatccctgctgaaggttactgctagccagccccagtcttccggcctccgtttcatcaacaacgccacggcgtaatgctgccgctacgcagatattcagcgccacaccatgttgcgcattcagttgttgccaggcccgtacgaggtcaaattcgtcacttgccggagaggtcaattggttagcgttatagaccccttcccgatagaaaaagacgctgcttaactcatggccatctgctatcagcgcctgcgcaaactgaaaagcactactcgcctgttgcgtaccgtatgctggcccggtcaccacgatggcaaaacgcattacttatcttgcccctggaaatcaccgctcttgaactggcggatgtagagatagacagtgtgtttggagatgttcaggcggtcagcaacctggttgatcgcatctttaatatcgaagatccctttctcgtagagattcagcacgatctgacgatttttggcgttattagaaacattgcgatcggcattcacttcttcgatggtgaactccagcgtttgggtaaccagatcttcaacagaagaggcaaagttgacgctactaccgacatccggggtttctggcggcacaaaggtgctcataatctggctgaagggaacatcaagattcatattgatgcacagcagaccaattacacgctgttcgcggttacgaatcgcgatagtcagggacttcattaatacgccgcttttggcgcgagtaaagtagcatttagaaacgctgctatccgctcccgtcatatcgtgcagcatacgtagcgccaggtcagtaattgggctaccaatcttccggcctgtatgttcaccgttagcaatgcgaatggcactacattttagatcctgcaaagagtgcaaaacgatttcacagtgggagccaataagcatcgctaacccgtccaccaccgcttcgtaggatttcagaatatcaaaatcggtctggtcgaaaggacgttgatccagtaaatccaactcactggtttcgttggttaaaaggctcctggacatgaaaaaaaacactccttttcaggagcctgtcgttaacttttcagggcaggctcattaatgatgcgggtaactaaattaatacagcggaggttccgctttccagcactaattatatccggcctgtaataaaaaaaccgccgcctggtcaggcggcggttcttaatgcttattttttagcagaatctgcggctttcgcatcagcttccggctttgcatcagccttcggcgctggtttcacatccagcagctctacgtcaaacaccagggtagaattcggtgggatccccggaacacccgctttgccgtaagccagttctggtggaataaccagtttgatcttaccgcctttcttgatgttcttcagaccttctgtccaacccgggataacaccgtccagacggaaagaaagcggttcaccacgggtgtaagagttgtcgaactctttaccgtcgatcagcgtacctttgtagttcactacaacagtatcgctgtctttcggtgcttcgcctttaccggcttctactacctgataaaccagaccagtactagaggttttcacacctttctctttggcaaatttctcgcggtactctttaccttttgcttcgttatcagccgcgtctttttccatcttcgcctgagcagaagacttcacgcgagcttcgaatgcttgtagagtctgttcgatctcttggtcggagagtttgcttttatcagcaaatgcatcctgaacaccagcgatcagctgatctttatccagtttgatgcccagtttttcttgttcttttagagagttttccatgtaacgacccaggctggcacccagtgcataagcacttttctgatcgtcatttttgaacgctgctttgctgtcagcagctgtagcaggttttgcagcttcagcagcaaaagtgattggtgcatgcagggcaacggccattgtggtcgccagcagcgttactttaaacagacttttcatccatatctccaggatcggggcatctcaccccagggttaactattatcagaagggtactataaagcgttgtcgaacaaatctacatacagacacgccctattatcatctattttcagactctttttgtttaaattagtttcgatgaccgcgaaatgagtgctgtctcgggcagcaaagttaagtagaatccgcggcgaccattcgacaaaagaggtgaatcatgcaggatttaagtttggaagcacgcctggcagagctggagagccgactggcttttcaggaaatcaccattgaagaactgaacgtcacggtgaccgctcatgaaatggagatggcgaaactgcgcgatcatctgcgtctgctgaccgagaagttaaaagccagccagccgagcaacatcgcgagccaggctgaagaaacgccaccgccacattattgaggcgtaaaaaaagcggggattccccgcttttttgtcactttttcggtattagtggcaaccgcaaccgccgttgcctttaccgccacagcagccttcgccaccgtgttcatgaccgtgatcgtggccatgaccgccgcagcaaccgtcgtggtcgtgatcgtggtggtgatcgtgcgcgccgtgaacgtgaccatgagccagttcttcttcagtcgcttcgcgaatcgccacaacttcaacgttgaatttcaggttctgaccggccagcatgtggttaccatcaaccacgacgtgatcgtcttcaaccgcagtgatttcaaccggtaccggaccctggtcggtttcagccaggaaacgcatacctacctgcagttcatcaacgcccataaatacgtctttaggaacacgttgcaccaggttttcgtcgtactgaccgtaagcgtcgttcgcgccaacagcgacatcaaatttgtcgccaacttcatgaccttccagcgccgtttccaggccagagatcagggaaccgtgaccatgcaggtagtccagcggcgcactcaccggagactcatcaaccaacacaccgtcttctgtacgtacctgataggccaggctgaccaccaggtcttttgctactttcatgatatctcctgagcatgggaagaatagtggcgcagattgtagcggaattctgcagccgtgtactcactagcttaaaaaaactcggcgcatatcgttagtccggatgaaaaatcccgatcacttgctcatctttgcgaacgtgatcgcgggcttctttgtctgcttctcgcatctgatgtccgcacttaacacattcaacaatatcaatattattttcgcgccacatcgccatactatcctgcgcctgacaggccgggcattttgcgcccgcaataaaacgttttcggattgccatctttaccctttactcaaattcatcccagccgtccagctggcgtcgttcttgttgcatttcacgctggaaaatctcttccagttcgcgtcgggcttccctggcgcgagaaatttgtacggtatcggcatgcattgggatgagctctcgcagcatccgcatatccaggcggcgaaaatgcagttgcgctcgctgtgcctgatgcggatgcatgccaagcgtgaccagcgtcttgcgccccagctctaacgcactggagaatgtttcacgggaaaactgcgtcacccctgcctgtaataactcatgcgcttccacacgtccgcgcgctcgcgcaagaatatgcaaatgcggaaagtgctgttggcatatttccaccagcttcatggtgtcttccggctcgttacaggtaatgacgatagactcagcggcctctgcacccgcagaacgtaaaagatcgacctgcgtggcgtcgccgtaataaactttgtagccgtatttacgcatcaggttaacggcgctgatatcccgctccagcacggtaatgcgcattttatttgccatcagcaaacgaccaatcacctgaccaaaacgcccgaagcccacgacaatgacctggggtttatcatcgttgacccacggtttttcgtcttcttcttccggtccgttaaactggcgggatagccatttatccaccagcttcatcagcaacggcgtggtcatcatggaaagcgtcaccgtcaccagcaacaacgccatctggtcgccctggaataagcgttgactagaagcggtagaaaagaggacaaaggcaaactcaccaccctgactcaacacgccagcaaactgcatccgctcactgctacgcacgccatacaatcgcgccagcagatacagcacgagaattttcaccgccaccagcacaaccacgcttatcactacccacaacagatgggtataaagcaccccgaggttgagactcatgccgacagagataaagaacaaaccgagcagcaagcctttgaagggatcgatagccgtttccagttcatggcgatattcactttccgccagcagcacgcccgcaataaatgtaccgagcgccatgctcagccccagcgcatccataaacaatgcggaacccaacaccagcagcagcgtcgcggcggtgaacacttcccgcacgccagaagctgcaataaagcggaataccggacgcagtaaatagcgcccaccaatcagcatgccgacaaacgccagcaccttcatgccgaccttcatccagtcgaaatgttcgtctgcgctccccgccaacaacggcactaacgccagtgctgggattactgccagatcctgaaacagcagaacgctaaacccgagctggccggattcgctgcgattcatccctttctcacgcatcaattgcaacgccattgcagtactagacatcgcaaggccaatgccaccgaccaccgccgcctgccaggcgaaatccgtcagcatcaataatcccgccagcaacgccgcgcttaacagcacctgtgccgcgcctacgccaaaaatgctacgccgcagttgccaaagtttggagggattcaactcaaggccgatgataaacatcaggaataccacgccgagttcgctaaagtggaggatctcatcgacgtcgctaataaaccccagcccccacgggccaattgcaatccctgccagcaaatatcccaacacagcgccaatacccagccggcttgccagcggcaccgcagccaccgccgcgaagagaaacagcactcctgcgagtaaaaaatcggaaccttccatcagcggcctcctggagacagcggatttgccagccagtcaccgtaggctctggcgtggctcgccagctcctgtgcgctttgccgtctcgcccagtaaataatgatgggacttaaccaatgcatccggcacatgcccgccgccagttcaaaggggcgcagcacatcgctcatcgggtagcgattcagcgcgtcataacggtaagcactttccggctcgccggtggtaatcacgctacgccagtactttcccgccagttggtttcctcccggcccgctggcaaaaccacgacttaatacccggtccagccactctttcagtagcgccgggcagctataggtataaagaggatgctgaaagacaatcacctcgtgctcgcgcagtaatgcctgctcacgggggatatcaataaaaaaatcgggatagtgcgcgtaaaggtcgtgcacggtaacattgctgagctgcgtggccggtttaagcagtacccggtttgccacgctgtcctgagattccggatgggcatacagcagcaaaactttcgctggctgagacatcatccccctcccggtatggtttttgtgtatagtcgctgttttgggctaccattgcgcccggtgcggcagctcgcccatacattacattatcataatgataagttaacatagtctgaacatacggcaccttatgattgttttctccagcttacaaattcgtcgcggcgtgcgcgtcctgctggataatgccaccgccaccatcaaccctgggcagaaagtcggcctggtgggtaaaaacggctgtggtaaatctaccctgctggcattgctgaaaaatgaaatcagcgccgacggcggcagctacacctttccgggaagctggcaactggcgtgggtgaatcaggaaacgccggcgttaccgcaagcggcgctggaatatgtcattgacggcgaccgtgaatatcgtcaactagaagcgcagctacacgacgccaacgaacgtaacgacgggcacgccattgcgaccattcatggcaagctggatgctattgacgcatggagtattcgctcccgtgctgccagcctgctgcacggcctcggtttcagcaatgaacaactggagcgcccggtaagtgatttttccgggggctggcgtatgcgtcttaaccttgcccaggcgctgatttgccgtagtgacttgctgctgctcgacgaaccgactaaccacctcgatctcgatgccgttatctggctggaaaaatggctgaagagctatcagggcacgctgatcctgatctctcacgaccgcgacttcctcgatccgatcgtcgataaaattattcatatcgaacaacaaagcatgttcgagtacaccggcaactacagtagctttgaagtacagcgcgccacccgtctggcgcagcaacaagcgatgtacgaaagccagcaggaacgcgtagcgcatctgcaaagttatatcgaccgtttccgtgccaaagccaccaaagcgaagcaggcccagagccgcattaagatgctcgagcgtatggagctaattgcccccgcgcacgtcgacaacccgttccgctttagcttccgcgcgccggaaagcctgccaaatccgttactgaagatggaaaaagtcagcgcgggctatggcgatcgcattattctcgacagcattaaactgaacctggtgcccggcagccgtattggtctgttaggccgcaatggcgcgggtaaaagcacattaatcaaactgttagccggtgaacttgcgccagtcagcggtgaaattggtctggcgaaagggatcaaactcggctacttcgcccagcatcaacttgaatacctgcgcgccgacgaaagtcctattcaacatctggcacgtttagcgccgcaggagctggaacaaaaactgcgtgactacctcggcggctttggtttccagggcgataaagtaaccgaagaaacgcgccgcttctccggtggggaaaaagcccgcctggtgctggcattaattgtctggcagcggccgaatctgctgctgctcgacgaaccgactaaccaccttgacctcgacatgcgtcaggcactcaccgaagcattaatcgagtttgaaggcgcgctggttgtcgttagccacgaccgtcatttgctgcgttccaccactgacgatctctacctggttcacgatcgtaaagtcgaaccgttcgacggcgatctggaagattatcaacagtggttgagcgacgtacaaaagcaggaaaaccagaccgacgaagcgccaaaagagaatgcgaacagcgcccaggcacgtaaagatcagaagcgtcgggaagctgagctgcgtgcgcaaacccagccactgcgtaaagagattgcccgtctggaaaaagagatggagaagctgaacgcgcaactggcgcaggcggaagagaaactcggcgacagcgaactgtatgaccagagccgtaaagcggagttgaccgcctgcctgcaacagcaagccagcgccaaatccggcctggaagagtgcgaaatggcatggctggaagcccaggagcagcttgagcagatgctgctggaaggccaaagcaactgatggcgcagataacgacgaccgatgccaatgaattcagcagcagtgctgaattcatccccatgcgcggctttagcaattgtcatctgcaaaccatgctgccgcgtctgtttcgtcgtcaggtgaaattcaccccgtactggcagcggctggagttgcccgacggcgattttgtcgatcttgcgtggagtgaaaaccctgcacaggcgcaacataaacctcgtctggtggtgtttcacgggctggaaggcagtctcaacagcccttacgcccacggtctggttgaggcggcgcaaaagcgcggctggctgggcgtggtgatgcattttcgcggatgcagcggtgaaccaaaccgtatgcaccgcatttaccatagcggcgaaaccgaagacgccagttggtttttacgctggctgcaacgcgaatttggtcatgcgccaacggctgccgtcggctatagcctcggcggtaatatgctggcctgtttgctggcaaaggaaggcaatgatctcccggttgatgcggcggtgattgtctctgcgccgtttatgctggaagcctgtagctatcatatggaaaagggcttttcccgcgtttatcagcgttacttgctgaacctgttaaaagccaatgccgcgcgcaagctggcagcctaccccggaacgctgccgattaatctcgcgcagttaaaaagcgtacgtcgcatccgtgaatttgacgatctcatcaccgccagaattcacggctacgccgacgctatcgactattatcgtcagtgtagcgccatgccgatgctgaaccggatcgccaaaccgacgctgattattcacgccaaagacgatccgtttatggatcatcaggtgatcccgaaaccggaaagtctccccccgcaggtggagtatcaactgactgaacatggcggtcatgttggctttattggcggtacattacttcatccgcaaatgtggctggagagtcgcattcctgactggttaacaacgtatctggaggcgaaaagttgttgatattaacgtatctggaggcgaaatcatgttgattccgtggcaagacctctcccccgaaacgctggaaaatttaattgaaagctttgtgttacgtgaaggcaccgattatggtgaacatgagcgtacacttgaacagaaagtcgccgacgtcaaacgccagctacagtgcggagaagcggtgctggtatggagcgagctgcacgaaacggtcaatattatgccgcgcagtcagtttcgcgaataacctgcaaccgtcggcggacgagataataatgatagctaagtcatggagttactatgtctgccaaacatccggtcattgcggtaacaggatccagcggcgcggggaccaccaccaccagcctcgcgtttcgtaaaatattcgcgcagttaaatctgcatgcagctgaggtggaaggcgacagttttcaccgttacacccgcccggaaatggacatggcgatccgcaaagcgcgcgacgccgggcggcatatcagctacttcggccccgaggctaacgacttcggcctgctggaacaaaccttcattgaatacggtcagagcggcaaagggaaatctcgcaaatatctgcatacctacgacgaagccgtaccgtggaatcaggtaccggggacattcaccccctggcaacctttaccggaacccactgatgtactgttttatgaaggtttacacggcggcgtagtcacgccacagcataacgttgcgcagcatgtggacttactggtcggcgtggtgcctatcgttaaccttgagtggattcaaaaactgatccgcgacaccagcgagcgcgggcacagtcgagaagcagtgatggacagtgtagtgcgtagtatggaagactatatcaactacatcacaccgcagttttcccgcacccatcttaacttccagcgcgttcccaccgtcgacactagtaacccgttcgcggcaaaaggtatcccgagcctcgatgaaagctttgtggtgatccattttcgtaatctggaagggatcgatttcccctggctgctggcgatgttgcaaggcagtttcatttcccacatcaatacgttagtggtaccgggcggcaaaatgggtctggcaatggaattaattatgctgccgctggtgcaacgattgatggaaggaaagaaaatcgagtaactctgctattacgccggataaaatactatccggcttcacaacgggatagttaagtcacgcggcaaccacttcatagctgtgagtaatattcaccgctttttccagcatcaacgccacactacaatatttctcggcagagagatcaaccgcacgcgcaaccgctgcgtctttcaggtcgcgaccggtgacgataaaatgcagattaatgtgcgtaaacaggcgtggtgcctcttcgcggcgttcagaggtcaattttacttcacaatcgaccacatcctgacgccctttttgcaggatgctaaccacatcgatggcactgcaaccacccgccgccatcaacaccatttccatcggacttggtgctttatcgccactgttgccgtccattaaaatctgatgaccagaggcggattcgcccagaaaagttaacccttcgacccacttcactcgcgcttgcatttttgctactccactgcgtcaattttcctgacagagtacgcgtactaaccaaatcgcgcaacggaaggcgacctgggtcatgctgaagcgagacaccaggagacacaaagcgaaagctatgctaaaacagtcaggatgctacagtaatacattgatgtactgcatgtatgcaaaggacgtcacattaccgtgcagtacagttgatagccccttcccaggtagcgggaagcatatttcggcaatccagagacagcggcgttatctggctctggagaaagcttataacagaggataaccgcgcatggtgcttggcaaaccgcaaacagacccgactctcgaatggttcttgtctcattgccacattcataagtacccatccaagagcacgcttattcaccagggtgaaaaagcggaaacgctgtactacatcgttaaaggctctgtggcagtgctgatcaaagacgaagagggtaaagaaatgatcctctcctatctgaatcagggtgattttattggcgaactgggcctgtttgaagagggccaggaacgtagcgcatgggtacgtgcgaaaaccgcctgtgaagtggctgaaattagctacaaaaaatttcgccaattgattcaggtaaacccggacattctgatgcgtttgtctgcacagatggcgcgtcgtctgcaagtcactagtgagaaagtgggcaacctggcgttcctcgacgtgacgggccgcattgcacagactctgctgaatctggcaaaacaaccagacgctatgactcacccggacggtatgcaaatcaaaattacccgtcaggaaattggtcagattgtcggctgttctcgtgaaaccgtgggacgcattctgaagatgctggaagatcagaacctgatctccgcacacggtaaaaccatcgtcgtttacggcactcgttaatcccgtcggagtggcgcgttacctggtagcgcgccattttgtttcccccgatgtggcgcagactgatttatcaccccgatatcaactatgcacttcgacaaacgctggtgctatgtttgcccgtggccgttgggttaatgcttggcgaattacgattcggtctgctcttctccctcgttcctgcctgttgcaatattgcgggccttgatacgcctcataaacgttttttcaaacgcttaatcattggtgcgagcctgtttgccacctgtagcttgctgacacagctactactggcaaaagatgttcccctgccctttttgctgaccggattaacgctggtacttggcgtcactgctgagctggggccattgcacgcaaaattgcttcctgcaagcctgctcgccgccatttttaccctcagtttggcgggatacatgccggtctgggaaccgttgctcatctatgcgttgggcactctctggtacggattgtttaactggttttggttctggatctggcgcgaacaaccgctgcgcgagagtctaagtctgctgtaccgtgaactggcagattattgtgaagccaaatacagcctgcttacccagcacaccgaccctgaaaaagcgctgccgccgctgctggtgcgccagcaaaaagcggtcgatctaattacccagtgctatcagcaaatgcatatgctttccgcgcaaaataatactgactacaagcggatgctgcgtattttccaggaggcgctggatttacaggaacatattagcgtcagtttgcatcagccggaagaggtgcaaaagctggtcgagcgtagccatgcggaagaagttatccgctggaatgcgcaaaccgtcgccgctcgcctgcgcgtgctggctgatgacattctttaccatcgcctgccaacgcgttttacgatggaaaagcaaattggcgcactggaaaaaatcgcccgccagcatccggataatccggttgggcaattctgctactggcatttcagccgcatcgcccgcgtgctgcgcacccaaaaaccgctctatgcccgtgacttactggccgataaacagcggcgaatgccattacttccggcgctgaaaagttatctgagtctaaagtctccggcgctacgcaatgccggacgactcagtgtgatgttaagcgttgccagcctgatgggcaccgcgctgcatctgccgaagagctactggatcctgatgacggtattgctggtgacacaaaatggctatggcgcaacccgtctgaggattgtgaatcgctccgtgggaaccgtggtcgggttaatcattgcgggcgtggcgctgcactttaaaattcccgaaggttacaccctgacgttgatgctgattaccaccctcgccagctacctgatattgcgcaaaaactacggctgggcgacggtcggttttactattaccgcagtgtataccctgcaactattgtggttgaacggcgagcaatacatccttccgcgtcttatcgataccattattggttgtttaattgctttcggcggtactgtctggctgtggccgcagtggcagagcgggttattgcgtaaaaacgcccatgatgctttagaagcctatcaggaagcgattcgcttgattcttagcgaggatccgcaacctacgccactggcctggcagcgaatgcgggtaaatcaggcacataacactctgtataacagtttgaatcaggcgatgcaggaaccggcgtttaacagccattatctggcagatatgaaactgtgggtaacgcacagccagtttattgttgagcatattaatgccatgaccacgctggcgcgggaacaccgggcattgccacctgaactggcacaagagtatttacagtcttgtgaaatcgccattcagcgttgtcagcagcgactggagtatgacgaaccgggtagttctggcgatgccaatatcatggatgcgccggagatgcagccgcacgaaggcgcggcaggtacgctggagcagcatttacagcgggttattggtcatctgaacaccatgcacaccattagcagcatggcatggcgtcagcgaccgcatcacgggatttggctgagtcgcaagttgcgggatagcaaggcgtaatgcaggctaaaccatcggataaggcattcacgccgcatccgacatcttttgcctgatgcttcgtatttacgccccaaccaccttcgccaccgcgtgggcgaaacgttgcatcccttcatcgatatccgcatcttccaccaccaggctcggtgcaaaacgcatcacatccggtccggcattcagcaccattacgccagcctctgcgcccgcatacaggaaatcacgcgcccgacctttgtactgtggtttcagctctgcgccaatcaacagccccataccgcgaatatcgctaaatacatcgtactgctgatcgatcttctgcagatggtcaacaaaacgctggcgtttcgcctgaatgccttccagcacttcaggggtattgatgatatcaaacgccgcccccgctactgcacaggccagaggattaccgccgtaggtggaaccgtgagaaccaggatgaaacgcagaagcaatttccgccgtggtcagcatggcgctaatcgggaagccgccgcctaacgctttcgcagaggtcagaatatccggcgtaacgccgtagtgcatgtaagcaaacaaatcgccggtccgccccatcccgcactgcacttcatcaaacaccaataatgcctgatgttgatcgcacagctcgcgcaagccctgcaaaaactctggcgtcgctgccgtcacaccgccctcgccctggatcggctcaaccaccaccgcacaggtgtgatcatccatcaccgctttcactgcatggagatcgttaaagggaacgtggatgatgtctgccggtttcggcccaaagccgtcggaatattttggctgcccacccacgctaacggtaaacaggctgcgaccatgaaaagcgttatggaaggcaataattttggttttgaacgggctatgacgcacacaggcgtaatggcgtgccagtttaaaggcggtttcgttagcttccgtgccggagttcataaacaccacgcgttcggcaaacgttgcctcaatcagtttacgcccaagacgcagcgccggttcattggtgaaaacgttactgatatgccacagagtttcgccctgggtttttaacgcgttcaccagcgcaggatggcaatggcccaacgccgtaactgcaatgccacccgcgaaatcgacatactccttgccttgctgatcccagattcggctgccctgaccttttaccggaataaactctgccggagcataaatcggcaggatcacttcatcgaaagtcgcgcgtgtaattgctgtttgttcaattgccatctcatgatcaccctgttacgcataaacaaatgtgaaattataaccacaaaatatgcataaaaaatcactaaatggcaatcagaaatcagcgatgcaggaaattagccagcagttgatgtccttgttcgctaagaatactttctggatggaactgcacaccttccagatcccactggcgatggcgaatccccataatctctcgggtttcgctccaggccgtcacgtcaaagcacgctggtaaactgtcaggttccaccaccaggctatggtagcgtgtcacggtaagtggatttgccagcccccgaaatacgccctcaccgttatgtgtaatcgggctggttttgccgtgcatgacctttgcggcgcgcacaactttaccgccaaatgcctgcgccattgcctgatgaccgaggcagacgccaagaatcggcaagcgcccggcatagtggcgaataacgtcaagggagatcccggcttcatctggcgtacaggggccaggactgatgacaattttttgtggtttaagggcgtcgatatccgccagcgtcaacgcatcgttgcgcttaaccagcacatccgcccccagttcacaaaagtactggtagaggttccaggtaaaagaatcgtagttatctataagcaggatcatggcggctccggtacaaaagaaccgcgctattttactcagattccccggcttcgcttaccactttgctaaatatcatctgcagtgcggtgagatcccccattgccccactctgatttgcctgattccaggcctctttttcgataccctgccagctcagttgatatccggcatgaatcgccagttgctcgaagaagatccgctgtgccagaccacttcccacccggaagggatgcagcacgttgatttcacaatagtaatgcgccagccgctcgacgaacttcgctttctccaggccaaccagataaccttcttcctccagatcctgcatcagggcattgccctctttttcgatataagcaaagtggcagaacggcgtatcaccctgataaatatcaacttcacgcagttgccctgcccagtcgaaaatatcctgatacagctggcgatggatagttcgcaaatgcggtaaaccgcgcaccagcggaccaagctcaatggtcgcagcacgcagcgccgtcatttcgtaagcggcctgttccagccgctgctgctggcggatgttcagccggttacgcatgatatcaaggcctggataaagatacggatcgcgcccttcgccgaatttatcgctcatagtgactcctcagctcttcaaggcgcgctaaagcctctgcggcagtaagagtgactaaaggcatctcgacgccttcaagacggcgactggcctgaaaattacgattacgctgaagctcccagagacgggacttttgcttatcggtgagtttcttcacttgatgcctccctgaacgtgtccatttgccacaagtataagcggcaaatccgggttacgccgggagagcagaagcgcgggcaagattgcccgcgcgagaaatcattacggcaggactttagcggaaaggataactaccggtttactcggcacattctggtacggaccaacgtcatgagtcggcacctgggaaatcttatcggcaacgtccatgcctttcaccactttaccaaataccgcgtaaccgaaatcacgctgaccatggtcaaggaaggcgttatcggcaacgttgataaagaactggctggtggcgctgtctttgtcagcggtacgtgccatcgcgatggtgccacgcgtgttgcgcaggccgttatcggcttcatttttgattggcgggtttggttttttctgctgcatctgctcggtgaaaccgccgccctgaatcataaagccaggaatgacgcggtgaaaggtagtgttgttataaaaaccgctgttcacataatcgacaaagttttgcacagacactggcgctttttgtttatccagctccagttcgatgttaccagcactggttgtcaacaatacgtgcgggtcccctttcgctgccattgctgcgggagaaagagcagaaagagcgaaaacagcagccatcgccgccagggtgcttttgaacatgagatttccttaacaaacagagcagaaaaaaagcaagtgaagagattctaaatagccttcaagaacaaggccatccctttacctaattttacgtatctgaaatatatgtaacctgacgatcactttttattccgtgatcaaaatcacctcttaaaatgcaatttagcaaccgattgcaataaaacatttaaacagatcacaaaatcacctaaaatcgcccgctcgcggcatatcccgctatgccattttatttttgaacgcaggccaatcatgactaacagcaatcgcatcaagctcacatggattagctttctctcctacgcactgactggtgcgttggttattgtcaccgggatggtgatgggaaatatcgccgattatttcaatctgcctgtttccagtatgagtaataccttcaccttcctcaacgccggcattttaatctctatcttcctcaacgcctggctgatggaaatcgtcccgttgaaaacgcagttacgttttggctttctcctgatggtgctggcggttgccggtttgatgttcagccacagcctggcgctgttcagcgcggcgatgttcattctcggggtggtcagcggcatcaccatgagcattggtacattcctggtaacacaaatgtatgaagggcgtcagcgcggttcccgcctgttatttaccgactccttcttcagtatggctgggatgattttcccaatgatcgccgcgtttctactggcgcgcagcattgagtggtactgggtttatgcctgcatcgggctggtgtatgtcgctatttttattctgaccttcggctgtgagttcccggcgctgggcaaacatgcgccaaaaacggatgctccggtagagaaagaaaagtgggggatcggcgtactgtttctctctgttgcggcgttgtgctacatcctcggtcagttaggttttatctcctgggtgcctgagtatgccaaaggcctgggcatgagcctgaacgacgcgggcacgctggtgagtaacttctggatgagttacatggtcggcatgtgggcgttcagctttattcttcgcttctttgatttgcaacgcattctgaccgtactggctggtctggctgcgattctgatgtacgtctttaacaccggaacaccagcacatatggcgtggagtattctcgctctgggcttcttctccagcgcgatctataccaccatcatcaccctgggtagtcagcagaccaaagtaccgagcccaaaactggttaactttgtcctgacctgcggaaccatcggtactatgttgacctttgtggttaccggcccgatcgttgaacatagcggtccgcaggcggcactgcttacagcaaacggtctgtacgctgtcgtctttgtgatgtgcttcctgttaggtttcgtcagccgtcaccgtcagcataacaccctgacctctcattaattgctcatgccggacggcactatcgtcgtccggccttttcctctcttcccccgctacgtgcatctatttctataaacccgctcattttgtctattttttgcacaaacatgaaatatcagacaattccgtgacttaagaaaatttatacaaatcagcaatatacccattaaggagtatataaaggtgaatttgatttacatcaataagcggggttgctgaatcgttaaggtaggcggtaatagaaaagaaatcgaggcaaaaatgagcaaagtcagactcgcaattatcggtaacggtatggtcggccatcgctttatcgaagatcttcttgataaatctgatgcggccaactttgatattaccgttttctgtgaagaaccgcgcatcgcttatgaccgcgtacacctcagctcttacttctctcaccacaccgccgaagagctgagcctggtgcgcgaaggcttctacgagaaacacggcatcaaagttctggtcggcgaacgcgctatcaccatcaaccgtcaggagaaggtgattcactccagcgccggacgtaccgttttttatgacaagctgatcatggcaaccggttcctacccgtggatcccgccaatcaaaggttctgatactcaggactgctttgtctatcgcactattgaagacctcaacgccattgaatcctgcgcccgtcgcagcaaacgcggtgccgttgttggtggcggcctgttaggtctggaagccgcaggcgcgctgaaaaacttaggtattgaaacccacgttatcgaatttgcccctatgctgatggcagaacagcttgatcagatgggcggcgagcagctgcgtcgcaaaatcgaaagtatgggcgtgcgcgttcacaccagcaaaaacacccttgagattgtgcaggaaggtgttgaagcgcgtaaaaccatgcgttttgccgacggcagcgaactggaagtcgactttatcgtcttctctaccggtatccgtccgcgcgataagctggcaacccagtgtggtctggacgttgctccgcgtgggggtattgtcattaatgattcctgccagacttccgatccggatatctacgccatcggtgaatgcgcaagctggaacaaccgtgtatttggtctggtagcacctggctacaaaatggcgcaggtcgccgttgaccatattctcggtagcgaaaacgcctttgaaggtgctgaccttagcgccaagctgaaactgctgggcgtagacgtaggcggtattggtgatgcgcacggtcgcacgcctggcgcacgtagctacgtttacctcgacgaaagtaaagagatctacaaacgcctgattgtcagcgaagacaacaaaaccctgctcggtgcggtactggtgggcgataccagcgactacggtaacctgctgcaactggtgctgaacgctatcgaactgccggaaaacccggattccctgatcctgccagcacacagcggtagcggcaagccgtctatcggtgttgataaactgccggacagcgcgcaaatctgctcctgcttcgacgtcaccaaaggtgatctgattgctgccatcaacaaaggctgccacacagttgcggcgctgaaagctgaaaccaaagcgggtactggctgcggtggctgtatcccgctggtcactcaggtactgaacgcggaactggcgaaacagggcatcgaagttaacaacaacctgtgcgaacactttgcttatagccgtcaggaactgttccatttgatccgcgttgaaggcattaaaaccttcgaagaactgctggcgaaacacggcaaaggctacggttgtgaagtttgtaaaccaaccgtcggtagcctgctggcctcctgctggaacgaatacattctgaagccggaacatactccgctgcaggattctaacgacaacttcctcgctaacatccagaaagacggcacctacagcgtgatcccgcgttctccgggcggtgaaatcaccccggaagggctgatggcggtaggtcgtatcgcgcgtgaatttaatctctacaccaagatcactggctcccagcgtctggcgatgtttggcgcacagaaagacgatctgccggagatctggcgtcagctgattgaagccggcttcgaaaccggtcatgcctatgcgaaagcactgcgtatggcgaaaacctgcgtgggtagcacctggtgccgctacggcgttggcgacagcgtcggcctcggcgtggaactggaaaaccgctacaaaggcatccgtacgccgcacaaaatgaagttcggtgtctccggctgtacccgtgaatgtagtgaagctcagggtaaagacgtgggtattatcgccactgaaaaaggctggaacctgtatgtttgcggtaacggcggcatgaaaccgcgtcatgcggatctgctggcggcggatatcgatcgcgaaacgctgatcaaatatctcgaccgcttcatgatgttctacatccgtactgccgacaaactgacgcgtaccgcaccgtggttagaaaacctcgaaggcggcatcgattacctgaaagcagtgatcattgacgacaaactggggctgaacgcacatctggaagaagagatggcgcgcctgcgtgaagcggtactgtgtgagtggactgaaacggtcaatacgccgtctgcgcagactcgcttcaaacacttcatcaacagcgacaagcgtgacccgaacgtgcagatggtgccagagcgcgaacagcaccgtccggcaacgccgtatgaacgtatcccagtaactctggtggaggacaacgcatgagccagtggaaagacatctgcaaaatcgatgacatcctgcctgaaaccggcgtctgcgcgctgttaggtgacgagcaggtcgcgattttccgcccgtatcacagcgatcaggtgtttgcgatcagcaacatcgacccgttcttcgagtccagcgtgctgagtcgcggactgattgcggaacaccagggcgagctgtgggtcgccagcccgctgaaaaaacagcgttttcgcttaagcgacggcttgtgcatggaagacgaacagttttccgtcaaacattacgaagcgcgagtgaaagacggcgtggtgcagctgcgcggttaatgttttaacgggaggcgcaatgcctcccctttttgcatggtcctgtaataatcttcggtatattgcaggacattttttaaactttttgttttattttttgtttttattttttaaaggataatcaaatgtttacagacactattaataagtgtgcggctaacgctgcgcgcattgcacgcctgagcgcaaataacccgctcggcttttgggtcagctccgccatggcgggcgcgtatgtgggtcttgggatcatcctgattttcacgctcggtaatttgctcgatccatccgtacgccctttggtgatgggcgcgacctttggtatcgccttaacgctggtgattatcgccggttctgaactgttcaccggacacaccatgttcctcacctttggggtaaaagcgggcagcatcagccacgggcaaatgtgggcaatcctgccgcaaacctggctgggtaacctggtcggttccgtcttcgttgccatgctctatagctggggcggcggtagcctgctgccggtagataccagcatcgttcactccgtcgcgctggctaaaaccactgcaccggcaatggtactcttcttcaaaggtgcattgtgtaactggctggtttgcctggcaatctggatggcgctgcgcactgaaggggcggcgaaatttatcgctatctggtggtgtctgctggcatttatcgcgtccggctacgagcactctatcgctaacatgacgctgttcgcgctctcctggttcggcaaccacagcgaagcctacacgctggcgggtattggtcataacctgctgtgggtgacgctgggtaatactttaagtggtgccgtattcatgggattgggttattggtatgctacgccgaaagcgaatcgtccggttgcggacaaatttaatcaaactgaaacggctgccggttaattactaaggggtttttacgtggatcatttgcctatattttgccaattacgcgatcgcgactgtctgattgtcggcggtggtgatgtcgcggaacgcaaagcaaggttgctgttagacgcaggcgctcgcttaacggtgaatgcattagcgtttattccacagttcaccgcatgggcagatgcaggcatgttaaccctcgtcgaagggccatttgatgaaagccttctcgacacctgctggctggcgattgcagcgacggatgatgacgcgcttaaccagcgcgtcagcgaagccgctgaagctcgtcgcatcttctgtaacgtggtcgatgcgccgaaagccgccagctttattatgccgagcattattgaccgcagtccgctcatggtagcggtctcctctggcggcacctctccggttctggcacgcctgttgcgcgaaaaacttgaaagtctgctgccgttacatctgggccaggtagcgaaatacgccgggcaattacgcgggcgagtgaaacaacagttcgccacgatgggtgagcgtcgccgtttctgggagaaattgttcgttaacgaccgcctggcgcagagcctggcaaacaacgatcagaaagccattactgaaacgaccgaacagttaatcaacgaaccgctcgaccatcgcggtgaagtggtgctggttggtgcaggtccgggcgatgccgggctgctgacactgaaaggactgcaacaaattcagcaggcagatgtggtggtctacgaccgtctggtttctgacgatattatgaatctggtacgccgcgatgcggaccgtgttttcgtcggcaaacgcgcgggataccactgcgtaccccaggaagagattaaccagatcctgctgcgggaagcgcaaaaaggcaaacgcgtggtgcggctgaaaggtggcgatccgtttatttttggccgtggtggcgaagagctggaaacactgtgcaacgcgggtattccgttcagcgtggttccgggtattaccgcagcttctggttgctctgcctatagcggtattccactcacgcatcgcgattatgcccagagcgtacgcttaattaccggacacttaaaaaccggtggcgagctggactgggaaaacctggcggcagaaaaacagacgctggtgttctatatggggttgaatcaggccgcgactattcagcaaaagctgattgaacacggaatgccaggcgaaatgccggtggcaattgtcgaaaacggtacggcagtcacgcagcgcgtgattgacggtacgctcacacagctgggagaactggcgcagcaaatgaacagtccaagcctaattattattggtcgggttgttggcctgcgcgataaactgaactggttctccaaccattaatttaacccgggccagagaattctggccttcttaatgactctttttatatattcagcaaataaaacatagccccttaataaatattatctgctaatgggttatattcaccgttacagcgacttacaaaattaagtcattcgctcactgacgccaattaaatattcctgtatcgttcttaacgagcagtctgcttatattcatataatcaatgaatattaattaatatataatacatagggaatgtaaatgaacaaatttattaaagttgcactggtaggtgcagtactggctacgttaactgcatgtactggtcatattgaaaaccgtgataagaactgctcttacgactacctgctgcacccggcaatttctatttctaaaatcattggcggttgcggtcctactgcacagtaagtctctgacagaaatcggctaacaccggtttaattgcccgacgccctctggattttccgagggcgtatttgtttctatgtccttcttgcccccgcccgtaaaaatattttcactttaaattcaatttgataactacatccattagccacagcgcgatcctgtgcgaaattttgtgatcttcctccacattacataacatcatatgttgttatattcatcatgcattgtcatgttaccttttaaatgactgcaaactctcccctacaacgtattggacaagaaaaaggtatcgctatgggaagccaggaactccaacgcaagctcggattttgggccgttcttgcaatcgccgtcgggacaaccgtcggctccggtatttttgtatctgtgggtgaagtggcaaaagcagcgggcacgccgtggcttacggtgctcgcgtttgtcattggcgggttaattgtgatcccgcaaatgtgcgtctatgcggaactatccaccgcttatccggaaaatggcgcagattatgtttatctgaaaaatgccggaagccgaccgctggctttcctctccggctgggccagcttctgggccaacgatgcgccgagtttgagcattatggcgctggcgattgtcagcaatcttggctttttaacgcctatcgatccgttgctcggtaaatttatcgccgccggattaattatcgcctttatgttgctacacctgcgctccgttgaaggcggcgcagcgtttcagacgctaattaccatcgccaaaattatcccgttcactatcgtcattggccttgggatcttctggtttaaagcggagaattttgccgcccctaccaccactgcgattggcgcaacgggcagctttatggcgctgctggcggggatctctgccaccagttggagctataccggcatggcctctatctgttatatgaccggcgaaattaaaaaccccggaaaaaccatgccacgagcgctgattggttcctgtctgctggttctggtgctctacaccctgctggcgctggtgatttccggcctgatgcccttcgacaaactcgccaattctgaaacgccgatttccgacgccctgacctggatccccgcactcggcagcaccgctgggatctttgttgccatcacggcgatgatcgtcattcttggtagcctttccagctgcgtgatgtaccagccgcggctggaatacgcgatggcgaaagacaacctgttctttaaatgcttcggccatgtgcatccgaaatacaacacgccggatgtctccatcatcctgcaaggggcgctggggatcttcttcatcttcgtttccgatctcaccagcctgctgggttatttcaccctggtgatgtgtttcaaaaataccctcaccttcggctccatcatctggtgtcgtaaacgcgacgattacaaaccgctgtggcgtactccggctttcgggctgatgaccaccctcgccattgcgagtagcctcattctggtcgccagtacctttgtctgggcaccgattcccggccttatctgcgccgtcatcgttattgctactggtctgcctgcttacgccttctgggcgaagcgtagccgccagctcaacgctttgagctaatgttatctggagaaaataaaatgttggatattgataaaagcaccgtggactttctggtcaccgaaaatatggttcaggaagtggaaaaagttctcagccatgacgttccgctggtgcacgccatcgtggaagagatggtgaagcgcgacattgatcgtatttatttcgttgcctgcggaagcccactcaacgcggcgcaaacggcgaaacatctggcggatcgcttttccgatcttcaggtctacgccatttccggctgggagttctgcgataacaccccgtatcgcctcgacgatcgttgcgcagtaattggcgtttctgactacggtaaaaccgaagaggtaatcaaagcgctggagctgggccgggcctgcggcgcactcactgcggcgttcaccaaacgcgcggatagcccgattaccagcgcggcggaatttagcattgattatcaggccgactgtatctgggaaattcacctgctgctctgctacagcgtggtgctggagatgatcacccgcctcgcgccgaacgcggaaatcggcaagatcaaaaacgatctcaagcagttgccgaatgcgctcggtcatctggtacgcacctgggaagaaaaaggccgccagcttggtgaactggccagccagtggccgatgatttataccgttgctgcgggtccgctgcgtccgctgggttacaaagaaggcattgtaacgctgatggaatttacctggacgcacggctgcgtgattgagagcggagagttccgccatggcccgctggagattgtcgaaccgggcgttccgttcctgttcctgctcggcaatgatgaaagtcgccacaccaccgaacgcgccattaactttgttaaacagcgtactgacaacgtgatcgtcatcgattacgccgaaattagccaagggctgcacccgtggctggcaccgttcctgatgttcgtgccaatggagtggctctgctactacctgtctatttacaaagatcacaacccggatgaacgccgctattacggtggtctggtggaatattaatccctctcccggcccggcaacgggccggatttacgcaaggagttacccgatgaaaacaggtatgtttacctgcggccaccagcggctgcctattgaacacgcatttcgtgatgcaagcgagctgggttacgacggcatcgaaatttggggcggtcgcccgcacgcgttcgcgccggacttaaaagcgggcggcatcaaacaaatcaaggcgctggcgcagacgtatcagatgccgattatcggctatacgccagaaaccaacggctatccgtataacatgatgctgggcgatgaacatatgcgtcgcgaaagcctcgacatgatcaagctggcgatggatatggcaaaagagatgaacgcgggttatacgctgatttccgcggcccacgcgggctatctcacgccacctaatgttatctggggacggctggcagagaacctaagcgaactgtgtgagtacgcggaaaacatcggcatggatctaatcctcgaaccgttaacgccgtatgaaagcaacgtcgtgtgtaatgctaatgatgtgcttcatgcgctggcgctggtgcctagcccgcgcctgttcagcatggtcgacatttgcgcgccgtatgtccaggcggaaccggtgatgagttatttcgacaaactgggcgataaattacgtcatctgcatattgtcgacagcgacggggccagcgacacgcattacattcctggagaaggcaaaatgccgctgcgggaactgatgcgcgatattattgagcggggctatgagggttactgtacggtggagctggtgacgatgtatatgaacgagcccagactctatgcccgccaggcgctggaacgctttcgcgcgctgctgccggaggatgagagatgaaaaccctggcgacaatcggcgataactgcgtcgatatctacccgcaactgaataaagcgttttctggcggtaatgcggtcaatgtggcggtgtactgcactcgctacggcatacagccgggatgcattacctgggtgggtgacgatgactacggcacaaagctgaagcaggatctcgcccgcatgggcgtcgatatcagccatgtccatacgaaacacggcgttaccgcacaaactcaggtggaactgcacgacaatgatcgcgtttttggcgactacaccgaaggcgtgatggccgactttgccctgagtgaagaggattacgcctggctggcgcagtatgacattgtgcacgcggcaatctggggacatgcggaagacgcattcccacagctgcacgctgcgggcaaacttaccgctttcgacttctccgacaagtgggacagcccgctctggcagacactggtgccgcatctcgattttgcctttgcctccgcaccgcaagaagacgaaacgctgcgtctgaagatgaaagcgattgttgcccgtggcgcaggaacagtgattgtcacgctgggtgaaaacggcagcattgcctgggatggcgcgcagttctggcgtcaggctcctgaaccggtgacggttatcgacaccatgggtgccggagatagcttcattgccggattcctttgcggctggtctgcggggatgacattaccgcaggcgatagcgcagggaacggcgtgcgcggcgaaaaccattcagtaccacggtgcctggtaagtataacgttggcgtgagcatcttcacgccaacgtgctgttacttgccggaaaacgaccctataatccgagtaattcattctttatttcagggtcgattatgagtgctacggaccgctactctcatcaactcctctacgctaccgtccgccagcgactgctggatgatatcgcgcagggggtttaccaggccgggcaacagatccctaccgaaaacgagctttgtacacaatataacgtcagccgcattaccattcgcaaagccatcagcgacttagtggcagacggcgtactgatccgctggcagggaaaaggcacctttgtacaaagccagaaagttgaaaacgccctgcttactgtcagtggttttaccgattttggcgtcagtcaaggcaaggcgacgaaagagaaagtgatcgaacaggaacgggtcagcgccgcgccgttttgcgaaaagctgaacatccccggaaacagcgaagtgttccatctctgccgggtgatgtatctcgataaagagccgctgtttattgatagtagttggatcccgctgagccgttatcctgactttgatgagatttacgtcgaaggaagctccacctatcagttatttcaggagcgttttgacacgcgagtggtcagcgacaaaaagaccatcgatatctttgccgccacccgcccgcaggcaaaatggctgaaatgcgaactgggcgaaccgttgtttcgcatcagcaaaatcgcctttgatcagaatgacaaaccggtgcacgtctccgaactcttctgccgcgccaatcgcatcaccttaactattgataataaaagacattaaccgtaggccggataagatgcgccagcatcgcatccggcgatgctggcgcgttgaattttacatcccgtacgttcccctcaccctaaccctctccccaaaggggcgaggggaccgttcagtacggaatttagcttgacggtgctatccagcattaaatactggcaatactctcacgcaaaatccgcagcaccgtctcttcaccgctgcgattcgggttaatgcgaatcgcacaatgttcactttgtggattcgcctggcgaaacgttccggaaaggcgataaaagagcggcgggatttcatatttgctctctgcacccaccgggtaaggcaaggcaccgcgcttttgcgcctcttccagcactctggcggcaatcggctgatgaaactcgacaatcaacaccttgctctgcgcattagcaatcaccgcgcttttcacttccggcaccgcaccaccgttaagcaaagccagcaaccgttcagatacccctgcctgcaccgcgtgcatcactggcgcaaacaccagaccacgcaatacttccagcgcctgtgcgccctggatctggctaccgccggagtaaagcgtggcgcgaatacggttgataacatcagcatcgccgaccactgcaccaacaccctctggcccaaatagcttgaagcaggaaaatgtgctgacattcgcgccgcattcacagccgattcgagccaccttcatcaccgcatagttgtcatcggttaacgctggaacacctgccgcgcgcaacgttgccagcacatctgccagcacgtagctgtcctgcggctgctggcgcgtatgctgcaccagcgccgcatccggttgttgctcgtcgacgacctgcttcagtgcgctcaggtcattgaaatcaacagtaataagcgtcagccccatctgctcaataataacccgtgtcgtcgggtaaacaggcgcgtcatgcaccagaagacgctgccccggtttgagcaaagccgccagcccggcgcgaatcgcgccagtccccgcgccctgcaccagcgccgcagcctgtgcgtgaaatgcatcagccagcacctgttccacacgctgggtaacgcgcggttgattcagtcctggcgttaagcctaaatcaccgccagtaagaaactcgctgccggggaaatggcgacaaatgctatccaccagcgcaaactgcttttgctgcgcctcaataatcgtcaggctttgcagaggaaacgtcttcataggtgccttccttaagccggaacgaacaggccaagccagtaaagaacattcagcagaataccggtgatcattactgccacgaccggtgccgccattttctgtaccggacggcccagggattcgttgaggaagtaaatggcaaccgcgatagagaatccggtataacccgccatcttaattgctgcgaaaatgctaccgaccagcagcgccacttccatcagcatattcatggcgttacggatgttatcgctcgcattacgcacgctcgggtagcgtcccagccatttgccgatgctacgaagcagcaagacttccgcgctaataaccactgcgcctaataccgctgcaaccatcggattcgggctgagatagtccaccgcataaacaaaggtaaagcccgcaactgcatacacacccgttgctaacgcggtggtggcaatcaacggcacaaaccccagtccgcgcataaattctgccagagccgcctgattaatcagcgtttggctttgttccggcgttacgcctgcggaatatgctttctccagtgtgaagatgctcacttcactgccagcaaaaatcttcatgctggcaacggcggcaatcaatgctcccacgatggcgatatagggtaagtttttgataatccgactcgtgcgttcttcaaacacgctaagcccgctggcatcaatgtcattttcatcacgatgacgcaggtcgtgagttatcgcgatccccagcagcatcaccatgccaataaagatttcgatggattcagggttaagatgtgggaaatagcgcacgactaccacacgggtcatcagtaccaccacggcggcgatcagactttgcttccagccaaactggtagaaaatcgccaccagcgggaacagtgcaaaagcactaaccaccgggctgcttaattcccccaggctacctaatacatccaccggcagcgcggtcagcagctggtttactggcaacaggcaagtaaggatcaacacgccccagatagcgccaagaccaaacgccatcaggctgtttatcgccaggacgccgaggatatcggtaggaagaaagagtaaccatgcgttgagcagcccggttttcagggtaaaagagatccccacgctggccacaaaaccaatgctcagaccaaaagcgatactccccgcctcgcgacggttcatatagccttcaatcagttgcggcaggatcgggcggatgccgtcatgaaaaacagccgcgctgcgatgcgccagaaggcttgtcatacccgtcaggcacgccaccacgataatctgaatatacagatccatagtcgtgccttttatttcagatggttaatcagcatcggaatcgcgtgttcgacgtgctcaacggaaaggccaaacgccacttttccttcagcgatcattttggcgatatgctcgtctttcgctttaatgcctggtttggcaatggtgcaacttttgttatagcctatcaccgcgatggcaatgctcaatgccgcgcccgcaccggtattacacgcgccgatgtaataatccagttgcccggatttcaccttcattgccgcttccatgtcgttgtgaatgaaaacttcaaaacagccaggagccgtcgcttcaatagtttttttaatctgctcacgctgtaagcctgcaacgccaatctttttcatgagtctgtccttattggaaaaattgagagggattttcacgtaacatcacatccacatcggcctgactgaatccactctggcgcaattgcggaataaaggtggttagtaaatagtcatagccataaccaccgttggcttttaaatgggagcggcgcgtaatatccatgctcagcatgacgcggttcagcaacccacggtcgcgtagcgcatgaagcatcgcaatacgcttttcgtccgggtagtaactgttcttgccgatggtgtcgaactgcacgtacgcgccgagatcgatcatcttcaaaatgttgtcgaggttgtctttcagatcgcagtgaccaacggtgacgcggctaagatcaaccccgtgggcttgtagcaacgccagttgctccagccccatcgtgctgaagctcgtatgcgtggagatcgggcgtccggtctggttatgcgccagcgcagcggcaataaataccttctcttccagcggcgtaatctttccttcgctggtgccgatctccgcgatgatcccggctttcagctccgtgccatcgataccctgttcaatttcatcgaccatctcctgcgccagttcctgcacgctgcgggtcgccacatgttccgggaaaaacgcgtcctggtaataaccggtacaggccaccacgttgatccccgtctcgcgcattacatcaagcataaattgcgcattgcgccccatgtaacggttggtcatctcaatcacattacgcacgccccgggtcatcaggtcgttcatctcctggcaaatgaacgcatactgatcaaggcggcagtccacgttgtttttaaagccggagagatcaatatgcagatgctcatgggcgagggtgtaacccgtcggatcaaaactcatagggtgtctcctgcaaaccggagggaggaaagaaaagagcgaccattttgtggcggtggcgcgcggaaaaattcacacacggtagcccccacatcagaaagcgtggtgcgcacaccgagctgcgtagcgatcatcccttgctgataaaccagcactggcaccacttcgcgggtatggtggctgtgaccaatggtcggatcgttgccgtgatccgccatcacgaccaggcaatcatctggctgcatcgcctcaacaagccgggcaaggttacggtcaacgacctgcaaacgttcggcataacgtgcgacgtcttctgcatgaccagcgaggtcggtttcctgaatgttggtgcaaataaacgccgtcggatgggtgttaaattcgttgagggtgatatccataatccgctggctatccaccagattttgccagctcacgccataaggattgttgacgatatctgccaccttacccaccagcacggttggcacgcctgcttcatacagtttttgtggcacctgcactttttcatcgacgccatagcccatatgcacgacctggaaaccgttgtcataagcgccagaacgcggcgcattgataccaataaagcgcccttctttgctttctgcggcatcgagaatgcgttgactgtcggttaacaggccaccaaatgtaatgacccgaccgacctgtacctgctcacgcacgatacgaccaattttgattgcgtcgtcaaaagagatcacagagagattggcggtaatgttatagacctggcctaaatccgcctcgagattatcgccaatcgcaaccgcctgattgacccacagaaattgcagatcatcgccacggcgctccacctgccagccagcggaaactaatgcctgctcaacacggtcaatcacatcgcgaaaaggcatccgcagcggcggtaacgggcgcgtgcctaaaatttcctgatgccccataaaggtatcgccaccttcatgttgcagctctgccacgccccaggttgcggaatcactcggctgcatatcgcctggcgcataacccaatgcgttgattagccccagcgtctccagcgttggtagctgcaaatgcggcaactggctcaggatgtgaccacatgtattcgctcccgcatcttgcggacgcaccagcgtgacatctttcattgcccctacgccaaagctatcaatcactaacaccacaaatcgcgccattacgcccccagagagtttccaagactgtcataacgaccgacgatttccggttcgccacgatgaataccggacaccagcaccacatcgctacgggtgacaaaaatctgcgtgcgaaaacagagcaccactgcactgcttaccggaaactcgcctgccagcggcagggtgtagtcgatactgctgtcatccacagttttgagattggtttcagtaatcttttgattttctggcgtaaacaccaacgcatgttgcgcatgaccacgacgatagtaaccgccgccgtagcagtagctgtcgccacggaaatgatgggagatttcacttaaccagagcatcgcgatacgttcaggctgatcgccctgctggtttgccggaatagtgcccgtcagcgcatgaccgggttcggcatgagtcacaccgtattgcgccagtaatggcaggctagtgcagctggtcgcactaggcgcgttcagttgctcaagtgcaataccagatttcgccagttgatcccgtgcctgtatcagcgtgtgaagattcggtgtcggcaaaacttttccgacagcctcatcccaaagcaggcaagggaaatgggtaagtccggctaaatgcagccctggcagattctggatttcggcgacaatctccggcaacaccttgagggcaaaaccgctctcctggcccggataaagaaaatcatcgtcgctataaactttaagcagcacagactggattcgcccggccttcaccgccgccgcagaaacttcccgcgctttgtcgagagtaaacacggtgatgacgtcggtgccctgttcaacggcgtcagcaacctgatgacaagggatttgtaccagatgcccctgatgcgccacaggcaaaccagcgcggcgcatgactcgcgcctctttgtaatccaccgccacaatgccgctgtagcctaatgccagcaatttttccgccagccacggattacgaccaaactgcttggtcatcagatacagttcaatgccgtaaagccgcgccgtctcaatcagccgcttaccgttttccagtatctgatccacgtcgatcacccagctgtccggggcgatcttgccctgctgccacaggcttagtgcggcggaaatcagcgccgggttctggcgtttcaatgcttctacaaacatcttgttgcctcgtttctgttccttgaattaaatattcatttttttgaatatttaggttgtgcgacgtggatttgtcgggagcttcaaacctcttcgttagcagccatccataatccataaaggttggccagcaaatagccttcttcacacgggttaacttccagtgcgaattccttcaacaacacctgatgcaattgcacaacggcttgccagtggctggattgcgccagttctgccagcaactcgttatccagcggctctatttcttcaccacggcgactgcgcatcagtgcactcgccatatgtgtcatcgccatcgttccttgctcactgcgcaccggcagatggcactctgtttccagtacgttgacgacctgcatcatgcctttgcagatgtccttatcaataacgcctgcctcgcaaagcaggttgagtctggtttccatatcagatgcctttcgtttaataactcggttcctgttccccactcactacccgttgttgatgggcgagcagggcgtgtttatctacaacggcacgcagcagttgttgcattgggtaatcatcgactcgcgtcaggaccacggcttcggtggcctgtaaaaatcgcggatcgtctgtgagcggcgtcgcctctaatcccagcatggtcagttcgttttccgccaccacgttccagatcaccgcatcgacatcgcctttaacaatgcgttgtaaactctcgtgataagagagatcgactcgttccacatcactaccgccaaaaaaaacatcggtcatgattttctgatccgcgctacggttatccagccccacgcgcttcacgtttgcggactcgcctttacggcaaatcaactggtgctcgccaacgtaggtgtgcggccccaactccagcgcgaggcataagcctttttgcgtgagataactttccgccgctagtcggctaaccaccgccatgtcatacacgccattaagcagacactccacgcgaatatccgcgccacgcatgtgcgcatagtaaaaaggaatgccatcaaactgggctttcaatccgctcgccaggccttcgtacaaacgggtatagggcaagggcattgcacataccacgttgttgatatccacatgagtcagcaatgctttgttatccatctcgaccagataactgccattgcgcccacggcgttcaatccgtatcgctccgctactttccagcgttttcaacgcggcctgcgtcaggccaacggaactacggcattcatttgccagctcatctatggttttcaatcgattaccgcacttttcacccaacaaataacgggccagcgtcgtgatgacgacgccttcttttttgataaacgttcgacgcataataaattttcagtaaattgaatatttatatcttcaggaatttgaagataaggcgcaacagcgagatgtggaaacggcgaggcacttcacattttttcggattattgcaaatgaggataaaaaaaccgggtttccccggtttcagagtgatgataaaagcaaaattgcctgatgcgctacgcttatcaggcctacatttccttgcaatatgtgcattactttgtaggccggataaggcgttcacgccgcatccggcatgaacaaagcgcaatttgccagcaatagtgaattacggcttcgccacaaaaccaatcgcttcgtacaccgcttttagcgtacgggaagcgtgcgcgctggctttttccgcgccatctttcatcacctgttgcaggaaggcttcatcgttgcggaaacggtgatagcgttcctgcaattcagtcagcataccggaaacggcatcagccacttcacctttcagatgaccatacatcttgccttcgaactgtttttccagttctgggatgctctggcccgttaccgcactaaggatatccaacaggttggaaacgcccgctttgttctgcacatcgtagcgaactaccggcggctcgtcggagtcagtgaccgcacgtttgattttcttcactacgcttttcgggtcttccagcaggccgataacgttattgcgattatcgtcagacttggacatcttcttggtcggctccagcaggctcattacgcgcgcgccagatttcggaataaacggctccggcaccttaaagatctcgccatacagcgcgttgaaacgctgggcaatatcgcggctcagttcgaggtgctgtttctggtcttcacccaccggtaccagattagtttgatacagcaggatgtccgctgccatcagcaccggatagtcaaacagaccagcgttgatgttctcggcataacgcgcagatttatctttaaactgcgtcatgcgactcagttcgccgaagtaggtatagcagttcagtgcccagcctaactgtgcatgttccggcacgtgggactgaacaaaaatggtgcttttctcaggatcgataccacaagccagatacaaggccagcgtatccagcgtcgctttacgcagcttctgtgcatcctggcgcacggtgatcgcgtgttggtcaacgatacagtaaatgcaatggtagtcatcctgcatgtttacccactgacgcagcgcacccatgtagttaccaatggtcaattcaccactgggctgtgcgccactaaaaacgatgggcttagtcatttttgctttcctgattttcgctatgcggaagccctaatgcgggcagaaggtcatttatagactgataaattacatcaggctggctgagatcgatagcctcgccgtagttatatccgtaggttaagccaacacttgggcaacctgccgcttttgccgcctgaatatcattgcgactgtcgccgacaaacagcatctgttgtggggcaattcccatccgctcagccaccagtaacagcgggtccggatgcggttttttgttttgcacatcatcaccaccaatcaccacgctgaagtatttggcgatatctaaggcttcgagcagcggcgcgacgaacggcgtcggtttgttggtgaccaggcctagcggcaggcctttagcctgcaacgcgcccaacgtatcggcaacgtgcgggaacaaaaacgtcccctcttcggcaacctcgccatagtagcgatcgaacagtttacgcagaatacgtacctgttcttctgccggaatgtcgtcatcaacgggcggtttacccattgttttacgctgagtcgcacgttcctgacgcgcccaggtcaatgcgcgctccatcagaacatctgcgccgttaccaatccaggtaataacgcgttcttcacctgcgacgggcaactccagcgcatacagcgccatatctaccgcagcagcaagaccaggagcactgtcgaccagcgtaccatcaagatcaaaagcgacgccgcgaatatcttcaaacttattcatgacttacctttgccagttcactgcgcatttcatcaatgacttttttgtagtctggctggtcgaagattgcgctaccggcgacgaacatatccgcgcccgccgcagcgatttcgccaatgttgttcaccttcacgccaccgtccacttctagtcgaatgtcaaagccagactcgtcgatacggcgacgtacttcgcgcagtttatccagtgtttgaggaatgaaagactgaccgccgaaaccagggttgacggacatcagcaggatcacatccagcttatccatcacgtaatccagatagctcagaggtgtcgccgggttaaataccagacccgctttacagccattttctttaatcagttgcagcgtgcggtcaacatgctcggaggcttctggatgaaaggtaatgatgctggcaccagcggcagcgaaatcaggcacaatgcgatcgacgggtttcaccatcaggtgtacgtcgataggggcggtaatgccatagttacgcaaggatttcagcaccattggcccaatcgtcagattgggaacatagtggttatccatgacgtcaaaatgcacgacatcagcgccagctgccagggcttttgcggtatcttcacccaggcgggcaaaatcagcgctcagaatactgggggcaatcaaatactgtttcatccgcttctccttgagaattattttttcgcgggactaacgactcctggtttgtacaaagccagcagttcgtccacctttttacgtgtgccgccgttgctgcttatactgcgtcgaactttgacgacatgcaattttgcgcgctgataccactcacgcgttaacatcgtatcgtgattggagatcagcactggaatatggcgctcaaccagaccttcggcgatctccgccagatgcgcttgttgttcaagcgtaaaactgtttgtgtgatacgccgtaaagttggcggtcgcagacagcggtgcataaggcggatcgcaatagacgacggatgcatcatctgcgcgcgccatgctatcggcgtaagactcacaatagaaaaaggcattctgcgctttttcagcgaagtgatacaactctgcttccgggaaatagggttttttgtagcggccgaacggcacgttaaactcaccgcgcagattgtaacgacacaggccgttgtaaccgtagcggttcaaatataaaaacagtaccgcccgacggaacggatcctggcttttgttgaactcttcgcggaactgatagtaaacctcggcgcaatttgtttcgggaacaaacagctcgcgtgcggcctgtacgtactcatcagtacgcatcttcacaatgttatagagactgatcaggtcgctattgatatcggcaaggatataacgagaaaagtcggtgttgagaaacacgctcccggcacctacaaaaggctcaaccagacattcgcccttgggcaaatgccgtttaatatcatcaagcaggggatacttgccccctgcccacttcaaaaaagcgcgatttttcttcatgctgactaactaattacaccttctccggctgtggagaaagctccgacagcatccagcgcttcaggcaactcccgcaacgataaaccattgcgggagataaccttgattacttcagatcggcctgtacctgacgcagcggtttcgcccacgggtttttggcctggacatctgctggcaatgtagataccgcttttttcgcctcttctttgctagcgtacacgccagaaaccaggacataccacggctgaccattacgcgtcgtttcatagacaacgtagtttttcagattctctttcttcgcccaaccgttcaggttgtcgtagttagaggaactgctcagctgcagagtgtaatggctggacggtgcgcttttcaagctaccaacattacctgcggtcttcgccccagcagcgggtgttgctgtggtttgcgccggggatgccgtctgtactggagccgtagtcgccgtctcttttggtgctggcgtagaagtcgcagccggtgccttcgtgctcgccacaggggcagctggttcagtacgcttcggcgtctgtgctaccggcttcggctccgttttcacggttgcttgcggttttttcggttcaatcaccgcctgctgacgagctgggcgcgtagtggacggacgttcagcggtttgcgttttcgccgtgtcacggcttgcattgccattgcgaacaggcgcaaccgttgcgggttcagtcggcaacgtggaattgaccgccacattgttcagctgttgctgattttgtggctgggtcagcgcattgttcaggtcaccctgcacttcaacacgttgttgaccatccgttgccaccggggtttgcccttgagtcggcgtagaagagatcggtggcagagaaacatcctgctgagtattttccgcagacgtggttcccggcgctggctgcacgccattcgcctgatcggtcgcattgccagcaagatcaatactcttctcgccagacgcggtttgatcgctggaagtggtgctgggggcttttagcgcagaaccgataccgatgatcaacagcagtagaaccagaatgccgacgcccatcatcatatactgacgagaagcgggtttactggctgcttttttgcgcttacgcggacgacgctctacgcgctcttcatccacggtttcatcttcggattcgtcaatttcttcttcgatttccggttcctcattgcgctctttttgcgcacgagtcggacggcgatcgtcagtgtcatcaagttcaatatcatcaaaattgatctgcggttcgccacgttcagtacgctcagaacgttcagaagattgacgagaacgaccagtacgacgatcgctgggatcgggtttcagctcgtcttctggtttgaattcatccatttaacaccccactaaaaggttaatgcttaccacgttgcaattaacctgaagctaatagaccgcttgataagcggcctgacctttcttgttgttacgcactttgacaatcggcaatggcgttaagaacaagctcgtggctaacgccgctgcgaacttcactcttaccaattgccaacggaagaattaagcgcatctctcccgcaaggactttcttgtcacgcagcatatgcggtaaatacgcctgcgcggacatttcgcgcggcccattgaccggtaacccagcccgcttgagcagggttataatacgctgcgtttcggcagaactaaactgcccgagacgttcgctcgtccgcgccgccatcaccatacccgcagcgaccgcttcaccatgtaaccaattgccataccccatttcagcttcaatggcatgaccaaaggtgtgtcccagattcagtaaagcacgtaacccggtttcgcgctcgtcggcggcgacaacttctgccttcagttcacaacaacggcgaatacagtacgccattgccggaccgtccagacgcaacaacgcatccagattctcttccagccagttaaaaaacgcaccgtcaagaataatgccgtatttgatgacttctgccagcccgctcgctaactcacgcgggggaagcgttttcagacagtcgagatccaccaccacactagcaggttggtagaacgcgccaatcatgtttttaccgaggggatggttgaccgcagttttgccgccaacggaggaatcgacctggctcagtaacgtcgtcgggacttgaatgaaacggacaccgcgctgataactcgccgccgcgaagccggtcagatcgcccactacgccgccgccaagcgccaccagcgtagtatcgcgaccatgcggtttttgtaacaacgccgtaaagacggtatcgagtacagccaggcttttatactgctcgccgtcagggaggataacgctatcgacgttaacacccgcctgttcaagtacgccgcggaccttatcgagatacagaggagccagggtttcgttggtgaccaacatgacctgctcgccgcttttcagcggtaagaaactagctggttcattaaacaaaccagatgcgatggtaattgggtaactacgttccccgagagtaacgacaatcctctccataacgcgacatccaccttaattactgtacccgcagacgagtgtatataaagccagaattagttgctttccagcatgtgaataatctggtttgcaaccactttagcgctttgatcatcagtacgaatggtcacgtcggcaatctcttcatacagcggattgcgttcattggccaacgcttccagaacttcacgcggcggtgtttcaacgtgcagcaacgggcgttttttatcacgctgcgtgcgtgcaagttgcttttcgatggtcgtttcaagataaacgacaacgccacgagcggaaagacggttacgcgtttcacgggatttcacagagccgccgccagtagccagcacaataccctgtttctcggtcaactcattgatgaccttttcttcgcgatcgcggaagccttcttcgccttctaaatcgaaaacccagcccacatcagctccggttcgtttctcaatctcttgatcggaatcgtaaaattccatattgagttgttgagctaactggcgcccaatagtgctttttccggcacccataggcccaaccagaaagatattgcgtttctctgccattttttcggtactactaagactattcgttaatgataaacccgcttcgctcagagagcgccgcaggacatgaactgaaacctcataagatattgcgagagtcagactgaaaattatctcaatactccagcgggtttggcaactgaataaatcacccatccctctgcatatctggtcgctgcaagcgcgctgccttgctaccaccgctctggcgataaatcaccgggtaagattagcgtaaaaaagacagcaaaatgccgcctgaatgataaatcatcatcatggaacgcaggcagcgaagagcaccaactctcaaatcggtactccttgtatgctaaatacctgcgcgcgtcaaatagatgaaacacgttcagcgtaaaaacattaccgcttttacggctgtttactcactggaaaccagtcgtggcgtgataaacaccactaactcgcgtcgttcatcttcttttccgtcatgacgaaataattgcccgaaccagggaatgtcgccaagcaacggtacgctatcctgaccgcttttatttttacgggtaaaaatgccgcccagcgccaacgtttctccgcttttgacctcgacctgcgtttcgatctcctgcttatcaatcgccagcacttcgccatcggcctgctgtagcacctgccccggaacgttctggctgatgtgtaatttcagccggatgcgacctttttgtaacaccgtgggcgtgacctccatccccaggacggcctctttaaattccacgctcgtcgcgccactttccccgctggaaacctgatatggaatttcgctcccctgtttaatgctggcaggctgaagatgactggccagcagacgcggactggcgataatatccagctgctgtttttgttcgagcgcggaaagctcaagatccagcaagcgtccgttgatgcgcccaatgttaaaaccgacatgcgttgtcgccgtcgctacggagaggtcgctaccaagcgtggtgacttgcccaacgccaccagcgtgttgcgcatcggccagcgtccatttcacgcctaactcacgcaaacttttttcattaatggtgacaatatgcgcgctcagctcaacctgcccgaccggcagatccatttgcgctacccactgttcaagcgcgcttaacgccgttttgttatctcgtagcaaaaggcgattggtgcgtttatcgacggtcatactccctttggcactcagtagcttctcccccgctttcgccagttctcccgcgtcggcgtattgcagggttatactgcgattttccagcggcagatttgcctgcgcccgcgcctgctccgcctcctggcgggcgatattgttattctgccaggcaatggaatgcacactgagaatgttgccttcctgccgcgttatcagtccggcgcttttcactacagtttgtagtgcctgcttccagggaacatctgttagatgtaagctcaccgtaccgctgacgtctgggctcacgaccaggttcaacttctcctgttcagccagcgcctgcaacacctgagctaccggaacgtcatccaccatcagcgtcactttttgcggctttgccgcctgtacgccgggtatcagcatcaacagtagtgcggctatccattgcttcatttgtatctccttgccgttgccacaaccattgtggcggttcgcagtttgtcccggtacccagcgttagtacgtctggcgtcagctgtaaaattgtccagccgttttccagcacatcgttttgctgcacccgtcgccatttcttttgcccgtcttttattacaccgatgatgcgctcgcctcgccctaccatcccctgatagcgccactggctaagttcgctaatccggcatagatcttccggcggtttaaaagggtcacgcataccggttaaaaggcacaatgcaatacctgccaacaaccagcgtttaaccctcatgcggcgtctccagttgtagcgtgaacaaaagatcatcaccttccacgcttaagctaaaacggctcacgctgacgttgcgctctgccagccgtgtaaatgcgctcggcactgcttcccacagcgttttcaacgccaactcgcctccctgcgcggatggatgccaggaaaccagttgcgcgccggataactgaaaatccagtgggctaaagggcagcgttttttcctcgctgaagggagcggtgtctaccaggcgatacagtgcggcccactgctggtgatgacttgcccgtagtcgaattaatgcgtcgcgctcttcatggtgtgtgctactcagaaaaatgagcgtaactaacatcagcaaccagaatgcccagcaaagctggcggaggcggggacttgtggcgaaccaccagtcaaagaacatgttcatcgctaaccttccttgttaactgatactcaaattgccagcgtccctgcgcatcctgctgcgtggctccccgctgattgagatgaaaagatgcatcctggcggagactcgtttctagtgcgtttaacgcggtaatgcttgttgtcagccccttgatctccagcgttccctgctgccagcttatcgttgtcagccaggcgtgctcgggtaaaagcgccgccagtgcttccagcgcagattgccagtcgcgggtaaattgtcgctggcgctgccgttggctacgctgttcgcgtaactgctgttgctccagcaaacgtggcttcgttatctgtaagctgcgggcgagttgttgttccgcctgaagcaaaactgcgtctatgcgcgcttcggcgctgcctgtcagacgcagtattagcgttatcccgacggccagcagcagaggcgcaacgaacatcagcaaccagaaacgcagaaaagcggtccggcgttgctgtcgccagggcaaaaaattaattggcgggttcatcagtacgccttcccaagcgccagccccagcgcgatggcaaagtctccacctggcggcggtagcggcggctgacgaacagaaacggcctcccagggatcaaatccgccttcgccacatatcgcgacgctttcgggatcaacggataacgctgccgccagctccttcgcgctagtcatccccaccgccagtttgcgcccccagctatagcgcgtcgcccacagccactgttcgttatcacgccaggccagacattgctgatgagaaggtaaaaaaggcaggaatcgctgtaatgcactggcatccggggtgatcgcgctcacatgaacacgcaacctttctgccagagtaagcagcgttgccagctctttgctttgcgcggcagtcacgttataggcgggactgagactgtcttcgctgtaatcgaagcgcagggagtccggatccatatccagctcgcgggccatcgtcccactcagccaggccgtttgctcccgctcaccaagggacatgctcgggcgcggaaaactccgctgtaatgtgcgactggcgggaaacgccaacataatgtgatgacgctgcggcagttcgcgactccacggtaacaacgttttagccagctgctgcgcatcaacaatccgcccatctttgataatgtcgttctccagcggcaaccgccaccagcgttgcaaaaagcattcttttgcgccccgcacgatcgcaaccgctaccgcttcttgctgttgtaaatgcaaaccaatttgccagatcttaaatgccattgtgatgatctccttatcacccgtcactctgacgggtatatcaatgcgtctggcttgcctttatactaccgcgcgtttgtttataaactgcccaaatgaaactaaatgggaaatttccagtgaagttcgtaaagtattttttgatccttgcagtctgttgcattctgctgggagcaggcagcatttatggcctataccgctacatcgagccacaactgccggatgtggcgacattaaaagatgttcgcctgcaaattccgatgcagatttacagcgccgatggcgagctgattgctcaatacggtgagaaacgtcgtattccggttacgttggatcaaatcccaccggagatggtgaaagcctttatcgcgacagaagacagccgcttctacgagcatcacggcgttgacccggtggggatcttccgtgcagcaagcgtggcgctgttctccggtcacgcgagtcaaggggcaagtaccattacccagcagctggcgagaaacttcttcctcagtccagaacgcacgctgatgcgtaagattaaggaagtcttcctcgcgattcgcattgaacagctgctgacgaaagacgagatcctcgagctttatctgaacaagatttaccttggttaccgcgcctatggtgtcggtgctgcggcacaagtctatttcggaaaaacggtcgaccaactgacgctgaacgaaatggcggtgatagccgggctgccgaaagcgccttccaccttcaacccgctctacagcatggatcgtgccgtcgcgcggcgtaacgtcgtgctgagccggatgctggatgaagggtatatcacccaacaacagttcgatcagacacgcactgaggcgattaacgctaactatcacgcgccggagattgctttctctgcgccgtacctgagcgaaatggtgcgccaggagatgtataaccgttatggcgaaagtgcctatgaagacggttatcgcatttacaccaccatcacccgcaaagtgcagcaggccgcgcagcaggcggtacgtaataacgtgctggactacgacatgcgccacggctatcgcggcccggcaaatgtgctgtggaaagtgggcgagagcgcgtgggataacaacaagattaccgatacgctgaaggcgctgccaacctatggtccgctgctgcctgccgcagtcaccagcgccaatcctcagcaagcgacggcgatgctggcggacgggagcaccgtcgcattgagtatggaaggcgttcgctgggcgcgtccttaccgtagcgatactcagcaaggaccgacgccgcgtaaagtgaccgatgttctgcaaacgggtcagcaaatctgggttcgtcaggttggcgatgcatggtggctggcacaagtgccggaagtgaacagcgcgctggtgagcatcaatccgcaaaacggtgccgttatggcgctggtcggtggctttgatttcaatcagagcaagtttaaccgcgccacccaggcactgcgtcaggtgggttccaacatcaaaccgttcctctacaccgcggcgatggataaaggtctgacgctggcaagtatgttgaacgatgtgccaatttctcgctgggatgcaagtgccggttctgactggcagccgaagaacagtccaccgcagtatgctggtccaattcgcttacgtcaggggctgggtcagagcaaaaacgtggtgatggtacgcgcaatgcgggcgatgggcgtcgactacgctgcagaatatctgcaacgcttcggcttcccggcacaaaacattgtccacaccgaaagcctggcgctgggtagtgcgtccttcaccccaatgcaggtggcgcgcggctacgcggtcatggcgaacggcggcttcctggtggacccgtggtttatcagcaaaattgaaaacgatcagggcggcgtgattttcgaagcgaaaccgaaagtagcctgcccggaatgcgatattccggtgatttacggtgatacgcagaaaagcaacgtgctggaaaataacgatgttgaagatgtcgctatctcccgcgagcagcagaatgtttctgtaccaatgccgcagctggagcaggcaaatcaggcgttagtggcgaagactggcgcgcaggagtacgcaccgcacgtcatcaacactccgctggcattcctgattaagagtgctttgaacaccaatatctttggtgagccaggctggcagggtactggctggcgtgcaggtcgtgatttgcagcgtcgcgatatcggcgggaaaaccgggaccactaacagtagcaaagatgcgtggttcagcggttacggtccgggcgttgtgaccagcgtctggattggctttgatgatcaccgtcgtaatctcggtcatacaacggcttccggagcgattaaagatcagatcagtggttacgaaggcggtgccaagagtgcccagcctgcatgggacgcttatatgaaagccgttcttgaaggtgtgccggagcagccgctgacgccgccaccgggtattgtgacggtgaatatcgatcgcagcaccgggcagttagctaatggtggcaacagccgcgaagagtatttcatcgaaggtacgcagccgacacaacaggcagtgcacgaggtgggaacgaccattatcgataatggcgaggcacaggaattgttctgattaaaaaggcgcttcggcgccttttcagtttgctgacaaagtgcacttgtttatgccggatacggcgtgaacgcgttatccggctaacaaaatcgtgaaaactcaataaattgcagaaaccccataagcctgataaacattgtgcatcaggcaaacttcacgcatttacactcgcccctgccctttcaaccattcgcgcacgaggaacagcgcactgacattgcgcgcttcattgaagtcagggtcttccagcaaatccatcatatgcgccagcggccagcgcacctgtggtagcggctctggctcatcgccttccagactttccgggtagagatcttgcgctaccacgatattcattttgctggaaaagtaagacggtgccatgctgagcttcttcaaaaaagtcagatcgttcgctccaaatccaacctcttcttttagctcgcggttagcggcttcgtagacgctttcacccggatcaattaatcctttgctaaaacctaattcgtaggattcagttcccactgcgtattcgcggatcaggatcaggtgatcgtccacaatcggcacaatcatcactgcttcccggttggttggacgcattcgttcataaacacgccgcacgccattgctgaactccagatccacgctctcgacggtaaacagtcgggaacgggctacagtttcaacattcagaatggtgggtttttgtaaacttttgctcatcgtgggatctatgctgtgaaatcagcggttattgtgcgatatcggacacgctttcggcaatgtgaattgcatgttatttacatttatgtaacttaataaataatcgtcctcaaatcaaattaaaagtcaataggttgaaataactccaggaatttgctgatattccgccttcagagggtttgctatgatcagcggttactgtgatgtgcttaatgatgctcaagttaaactccacgcttgccgatagccaaccgcagaatcatgtattgtgtccggtgcgactgaccacgcctgacagactaagtaagatggggaaagcatgagcaccattgtgatttttttagctgctttgctggcctgcagtctacttgcgggatggctgataaaagtgcgatccagacggcgtcagctgccctggaccaacgccttcgcggatgcgcaaacgcgtaaactcacacctgaagaacgtagcgccgttgaaaattatcttgagagcctgacgcaggtattacaggtgcctggcccaacgggagccagcgcggcaccgatctctctggcgctgaatgccgaaagcaacaacgtcatgatgctgacacacgctatcacgcgttacggcatctctaccgacgatccgaataaatggcgttactacctcgatagcgtagaagtccacctgccccctttctgggaacagtacatcaacgatgagaataccgttgaactgattcataccgatagcctgccgctggttattagtctcaacggtcatacgctgcaggagtacatgcaggaaactcgcagctatgccttgcaacctgttccgagtacgcaggcgagcattcgcggggaagagagtgagcaaatcgagctactcaatattcgcaaagaaacgcatgaagaatatgcgctgagtcgtccgcgcgggctgcgtgaagcgttgctgatcgtcgcctccttcctgatgttctttttctgcctgattaccccggatgtatttgttccgtggctggcaggcggcgcgttactgctgctgggcgcaggtctgtgggggctattcgcgcccccggcaaaatcctccctgcgggaaattcattgtctgcgcggtacaccccgtcgttggggattgtttggcgaaaacgatcaggaacagatcaacaatattagtctcggtattatcgacctggtctatcccgcacactggcagccatacattgctcaggatctcggtcaacaaaccgatatcgatatctatctcgaccgccatgtagtgcgtcagggacgatatcttagcctgcatgatgaagtaaaaaactttccgttacagcactggctgcgcagtacgattatcgctgcgggcagcctgctggtgctgtttatgctgttattctggatcccgctggatatgccgctgaaattcactctcagttggatgaaaggcgcgcagaccattgaagccaccagcgtaaaacaactggctgacgctggcgtgcgggtaggcgatacattgcgtattagcggtacgggaatgtgtaatattcgaacttccggaacctggagcgcgaaaaccaatagtccttttttaccgtttgactgcagccagatcatctggaacgacgcccgcagtttgccattaccagaatctgaactggtcaacaaagcgacggcattgactgaagcagttaatcgccagctgcaccctaaaccggaagatgaatctcgcgtcagtgccagtttacgtagtgcaattcaaaaatccggcatggtattgcttgatgattttggcgacattgtactgaagacagcggatttatgttctgccaaagatgactgtgtgcgactgaaaaatgcgctggtcaatctcggcaacagtaaagactgggacgcgctggtaaaacgcgccaacgccgggaagctcgatggcgtgaatgtgttattacgcccggtgagtgcggaaagcctggataacctggtggcaacctccaccgcgccgtttatcacgcatgaaacggcgcgagcggcacaaagtctaaacagtccggcccccggcggattcctgattgtcagcgacgaaggcagcgattttgttgatcagccctggcctagcgcaagtctttacgactacccgccgcaagaacagtggaacgctttccagaaactggcacaaatgctgatgcatacgccgtttaacgccgagggtatcgtcacaaaaatcttcactgacgccaatggtacgcagcatattggccttcatccgatcccggatcgttccggcctgtggcgctatctcagcaccacattgctgctactgacgatgctgggtagcgccatttacaatggcgtacaggcctggcgtcgttaccagcgtcatcgcactcgcatgatggagattcaggcctattatgaaagctgcctgaacccgcaactgatcacccctagtgaaagccttatcgaataacacgtttgcgcggcaggttatgctaccctgtcgcgcaaattgcttcactctggagatttccctcatgcatatcaacattgcctggcaggacgtagataccgttctgctggatatggacggcacgttgctcgacctcgccttcgataactatttctggcaaaagctggtgcctgaaacatggggcgcgaaaaacggggttacgccacaggaagcgatggaatatatgcgccagcaatatcacgacgtacagcatacgctaaactggtactgtcttgattactggagtgagcaactgggtctggatatctgtgcgatgaccaccgagatgggaccgcgtgccgtactgcgtgaagataccattccgtttcttgaggcactgaaagccagcggtaagcagcgaattttgctcaccaatgcgcatccgcacaacctggcggtaaaacttgagcataccggtctggacgcacaccttgatttattactttccacccacacatttggttatccgaaagaggatcagcggttatggcatgcggtggccgaagctacgggtctgaaagctgaaagaacgctgtttattgatgacagcgaagcgattctcgatgctgccgcgcaatttggtattcgttactgcctcggcgtgactaatcctgattccgggattgccgagaaacagtatcaacgccatccgagtctgaatgactaccgccgcctgatccccagcctaatgtgaaggagacgccatgaaagagaaacctgctgttgaggttcgactggataaatggctatgggctgcccgtttttataaaacccgcgcgctggcccgtgaaatgattgaaggcggtaaggtgcattacaacgggcagcgcagcaagccgagcaaaatcgtcgagctgaatgccacgctcactctgcgccagggaaatgacgaacgcacggtgattgtaaaggcgattactgaacagcgtcgccccgccagcgaggcagccttgctgtatgaagagactgcggaaagtgtagagaaacgcgaaaaaatggcgctggcacgtaaacttaatgccttaaccatgccgcacccggaccgacgcccggacaaaaaagagcgccgcgacctgttacgatttaaacacggcgacagtgaataactgtcacctgcaagagagatgattatgccgcaacatgaccaattacatcgctatctgtttgaaaactttgccgtgcgcggcgaactggtaaccgttagcgaaaccctgcaacagatccttgagaaccacgattatccgcagcccgttaaaaacgtgctggcagaactgctggttgcgaccagcctgttaaccgctacgctgaagtttgatggtgatatcaccgtacagctgcagggcgacggtccgatgaatctggcggttattaacggtaacaataaccagcagatgcgcggtgtggcgcgcgtgcagggcgaaattccagaaaatgccgacctgaaaacgctggtcggcaatggttacgtggtgatcaccattaccccgagcgaaggcgaacgctatcagggcgtagttggtctggaaggtgataccctggcggcctgcctggaagattactttatgcgttctgaacagctgccgacgcgcctgtttattcgcaccggcgacgtagacggcaaaccggctgcaggcggtatgttgttgcaggtaatgcctgcgcaaaatgcccagcaggacgactttgaccacctggcgacgctaaccgaaaccatcaaaaccgaagaactgctgaccttaccggcaaacgaagtgttgtggcgtttgtatcacgaagaagaggtgacggtttacgatccgcaggatgtggagttcaaatgcacctgcagccgtgaacgttgcgccgatgcgctgaaaacgctgcctgatgaagaagttgatagcatcctggcggaagatggcgaaattgacatgcattgtgattactgcggtaaccactatctgttcaatgcgatggatattgctgaaatccgcaacaacgcgtctccggcagatccgcaagttcattaatgagtatgtccggcagagagggctctgccggattttacgactaatacacctgatgcgctttgtcactcattcagattcacattcagcctttcaccatccactacaagatcgcgccacgctttaggcttcgtccccagttttccatccttcgcagctgtgagtaatttttctttcgttatttcgttcggaagtaaactcatatcaagcgcgtcccattcttttctgtcactgtcaaagccatagacaatgactctgtcatcattaaaagcaaacaggatccgctccgcctgaccatcactattcagatcttgctcgaccaggacgcaggcgtctttttcaatacaggtcatcacgttatagcgatcctggattaaggcgctccagaatgtcgcatcaggtttaacagaaccaggggcaattaacacattatcggctaatactttttcgcttacctgttgctgaagatgttgctctccatctaacgccatcagcagatcccgcgcgcgtttcgggtctttcataaacccggcatcgcttttcaggctctcaagcgcagcacgtccatagcgaccgctctgctcgagcatgtagatagttacctggtcactcgtgtttttgccgctctgataacgcgccatatggctgttcacgctaatgcgcatactgtccagcaccgggctattaagaagcaccagtatcaccaacaccaataagctaaccgcaaggttcactttgccctgaagaacaacgggattttgccctttacgccagacgatgctgacaaaataccccaggctccacaccagtaacaccagcaccgccagcacgccctgcaagcggtcgacagtccagccgtactgagcgacccgcagccataacgcccaggcggcgacgaacacatacagcggagcaaccagcaaagcggttttaatcaggcaacgcaacggccctgtccagggaagactcgctttttgcggatcgcggacaatagccattaagatcaattgcaaaaaggccagcgtcaacagcaacccggcggcggagatgtggcgagaaatcgcgctcaggcccgtaaacggcagggtgatgataaacatcagggttagcaaacttactaacggcagcaaccccgtggcgattaacgtgaacaacttttgaatagagtcgattaaacgactctgtgttcgcgcgaggatcaccgccagcgcggtaaccagacctaacgtgagataaataaaccagtcggttgcaaaaaagagcgtattgaaaaacgtgatgccaacaagtttaaacaactcactccacagtaaaagcaccagccacgtcaagccattggcgagaaaaatcaccagtaatataagtacgttatgccatacactctggtaaaaatagcgatagcggctactgtcattgcggatgcgaaggctttgttgtatccacggtagcaacaacattgccatcaacagcagatagcaaccaaaatcccaaagcgccttttcagctctccaggggttcatgccatcagtttgccacttcagccagccgctcatccccagcgtggcaataaacactagcgccagccatccccaaaggcgcttctgtttaaaagagatcacggagaagagtaaaacggaactaaacgcgacggtcgcaggcacgccataaacaatccaactgtgattttttccggaaagccaggcgatcagcaggtagcaaaccagaccctgaagtaatccggtagcaatcatcccccagcgtgttgcgggactaagttcaacgttatccatgttggttatccagaatcaaaaggtgggttaattatcgcatccgggcagtagtattttgcttttttcagaaaataatcaaaaaaagttagcgtggtgaatcgatactttaccggttgaatttgcatcaatttcattcaggaatgcgattccactcacaatattcccgccatataaaccaagatttaaccttttgagaacattttccacacctaaaatgctatttctgcgataatagcaaccgtttcgtgacaggaatcacggagttttttgtcaaatatgaatttctccagatacgtaaatctatgagccttgtcgcggttaacacccccaaaaagactttactattcaggcaatacatattggctaaggagcagtgaaatgcgcgttaacaatggtttgaccccgcaagaactcgaggcttatggtatcagtgacgtacatgatatcgtttacaacccaagctacgacctgctgtatcaggaagagctcgatccgagcctgacaggttatgagcgcggggtgttaactaatctgggtgccgttgccgtcgataccgggatcttcaccggtcgtagtccaaaagataagtatatcgtccgtgacgataccactcgcgatactttctggtgggcagacaaaggcaaaggtaagaacgacaacaaacctctctctccggaaacctggcagcatctgaaaggcctggtgaccaggcagctttccggcaaacgtctgttcgttgtcgacgctttctgtggtgcgaacccggatactcgtctttccgtccgtttcatcaccgaagtggcctggcaggcgcattttgtcaaaaacatgtttattcgcccgagcgatgaagaactggcaggtttcaaaccagactttatcgttatgaacggcgcgaagtgcactaacccgcagtggaaagaacagggtctcaactccgaaaacttcgtggcgtttaacctgaccgagcgcatgcagctgattggcggcacctggtacggcggcgaaatgaagaaagggatgttcagcatgatgaactacctgctgccgctgaaaggtatcgcttctatgcactgctccgccaacgttggtgagaaaggcgatgttgcggtgttcttcggcctttccggcaccggtaaaaccaccctttccaccgacccgaaacgtcgcctgattggcgatgacgaacacggctgggacgatgacggcgtgtttaacttcgaaggcggctgctacgcaaaaactatcaagctgagcaaagaagcggaacctgaaatctacaacgctatccgtcgtgatgcgttgctggaaaacgtcaccgtgcgtgaagatggcactatcgactttgatgatggtagtaaaaccgagaacacccgcgtttcttatccgatctatcacatcgataacattgttaagccggtttccaaagcgggccacgcgactaaggttatcttcctgactgctgatgctttcggcgtgttgccgccggtttctcgcctgactgccgatcaaacccagtatcacttcctctctggcttcaccgccaaactggccggtactgagcgtggcatcaccgaaccgacgccaaccttctccgcttgcttcggcgcggcattcctgagcctgcacccgactcagtacgcagaagtgctggtgaaacgtatgcaggcggcgggcgcgcaggcttatctggttaacactggctggaacggcactggcaaacgtatcagcattaaagatacccgcgccattatcgacgccatcctcaacggtagcctggataatgcagaaaccttcactctgccgatgtttaacctggcgatcccaaccgaactgccgggcgtagacacgaagattctcgatccgcgtaacacctacgcttctccggaacagtggcaggaaaaagccgaaaccctggcgaaactgtttatcgacaacttcgataaatacaccgacacccctgcgggtgccgcgctggtagcggctggtccgaaactgtaatgatttgaagctggagaatatctatccagtatcttatagaaagcaaaacgggaggcaccttcgcctcccgtttatttacccttcttttgtcgtgccctgcgcccgcgttaccggcactggcagccaggcgcgaatggaaagcccgccccgctcgctggtgccaagctccagcatcccgttatggttatccacgatacgctgcacaattgccagccctaatcccgtgccgctaatggtgcgcgcactgtcgccgcggacaaacggctggaacaggtgcttacgttgttccggcgcaattcccggaccgtcatcttccacctggaaccaggcgcgattcggctccgttccgctgctgactttgatccagccattgccataacgggcggcgttgaccaccatattcgccaccgcgcgtttgatgctcagcgggtgcattttcacttcaatgctgccggggtaaagcgcggtttcaatttcccgctcatagccactttcggcagcaatcacctcaccgagtactgcattaagatccgccatttccatcggcatctcctgcccggtgcgcaggtagtcgataaactgctcaatgatggcgttgcactcttcgatatctttattgatgctttctgccagatagccatcctgctcgctcatcatctcagtcgccaggcgaatacgcgtcagcggcgtgcgcaagtcgtgacttacccccgccatcagcagcgtgcggtcatccgccagttgcttaacaccagccgccatatggttaaaggcacgggtaacggaacgcacctcgctagcgccatactcacgcagcggcggcggaataatccctttaccaacctgcaaggctgcgtgttcgagatcgaccaacggtcggttctggatacgaataaacagccacgccccgcctatcgccaatagcataatcgccagcgtatagcggaacagcggagagaaatcgccctgatgaatttcggtcagcggcacgcgtacccagatattggggctcagccaggttttcagccagacgacagggctacttttgttgacctcaacgcgcacttccgtcgggccgcccagttgctgcgccatctgatggcttaagaattcatagtgttgcgcccaacgcagacctgcctcttcggcagcctcgttggagtagagagagatccccagctcacggtagatctcccgacggaaagcgggaggcacaaccaactgcgtgccgtcctccagttgcagtttgtcggtcatcaacatacgcacttcgtacgcgaggactttattaaactgctggaggctcggcaaaatcgcgaagttcagcaccaccagataagtcgtcaccaggctggcgaacagcaaggtgacgatgagcaataacgtacgggcaaaactacttcgtgggctgaagcgcaatcgcctcatgctttagagccgtccggtacaaagacgtagcccagaccccagacggtctgaatgtaacgcggatgcgctggatcttcttccaccatgcggcgcagacggctaatctgcacgtcgatggagcgttccattgcggaatattcacgaccacgggcaaggttcatcagcttatcgcgggagagcggctcacgcggatggctgaccagtgccttcagtaccgcaaactcaccgctggtgagcggcatcggctcgtcttcgcggaacatttcgcgcgtaccgaggttaagtttgaacttaccgaaagcaattaccgcctcttcctgactcggtgcgcctggcagttcgttcgcctgacgacgcagcaccgcacggatacgggccagcagttcacgcgggttaaacggttttggaatgtagtcgtcagcgccaatctccaggcctacgatacggtccacttcttcccctttcgccgtcaccataatgatcggcatcgggttgctctgactacgaagacgtcggcaaatgctcaagccatcttcaccaggtaacattaaatccagtaccataagatggaaagattcacgagtcagcaggcgatccatctgttctgcattagcgacgcttcgaacctggaagccttgttcggtgagataacgttccagcagcgcacgcaggcgcatgtcgtcatcgaccaccagaatcttgtagttctcttgcattgtttgtactcccaaaggttcgcaacaatttgtaagcgtgtattcttaaaaaagctcacgttcgtcaccagctaaatctggtatgaatttcagcctaaattgttacaaagcatattaaacagcagcttaagtatacaatttattcggcgaaacattattgattctgttgatatgatcacgttatacccaatgtgcgcattatcaaacagacaaagggaatcaacgagatgaaaacgcccctggttacccgggaagggtatgaaaaactcaaacaagagcttaattatctctggcgtgaagaacgcccggaggtcacaaaaaaggtgacctgggccgcaagtctgggcgaccgcagcgaaaatgctgactatcagtataataaaaagcgtctgcgtgaaatcgaccgtcgcgtgcgctatctcactaaatgcctggaaaatctcaaaatcgtcgattactcccctcagcaggaaggcaaagtcttttttggcgcgtgggtggagattgaaaacgacgatggcgtgactcaccgtttccgtattgtcggctacgatgaaatttttggccgtaaagattacatctctatcgattccccgatggcccgcgcattgctgaaaaaagaagtcggcgatctggcggtggtgaatacccctgccggggaagcgagctggtatgttaatgctatcgagtacgtgaaaccgtaaggaagagtcttaacctcctgccgatggctggcatttttgccagccagtccgtataactatcccctgatttttgatccgaaaagatgaactcaaaccatgatgaatgatagcttctgccgcattattgcgggtgaaattcaggcgcgcccggaacaggttgacgctgccgttcgcctgcttgacgaagggaataccgtgccgtttatcgcacgttatcgtaaggaaatcaccggcggtctggatgacacgcagctgcgtaatctggaaacgcgtctgagctatctgcgcgagctggaagagagacgtcaggcgatcctcaagtccatttccgagcaaggcaaactcaccgatgatctggcgaaggccatcaacgccaccctaagcaaaaccgaactcgaagacctctacctgccctacaaacctaaacgccgcacccgcgggcaaatcgccattgaagcagggcttgagccgttggctgacctgctgtggagcgatccgagtcacacgccagaagtcgccgctgcacaatatgtttatgccgataaaggcgtggcagataccaaagccgcgctggatggcgcgcgctatatcctgatggaacggtttgccgaagatgccgcgctgctggcgaaagtgcgtgattatctgtggaagaacgcgcatttggtttctacggtggtgagcggtaaagaagaggaaggggcgaaattccgcgactatttcgatcatcacgaaccgttgtccacggtgccttctcaccgcgcgctggcgatgttccgtgggcgtaacgaaggcgtacttcagcttagcctgaatgccgatccacagttcgatgagccgcccaaagagagctattgcgagcaaatcatcatggatcaccttggcctgcgcctgaacaatgccccggcggatagctggcgcaaaggcgtggtgagctggacgtggcgcatcaaggtgctgatgcatctggaaaccgaactgatgggcaccgtgcgcgaacgtgcggaagatgaagcaatcaacgtctttgcccgtaacctgcacgatctgctgatggcggcccctgccggactgcgtgcaacgatgggcctcgatccgggtctgcgtactggggtaaaagtggcggtggtcgatgccactggcaaactggtggcgaccgacaccatttacccgcacaccggacaggccgcaaaagcagcgatgaccgttgctgcgctgtgtgaaaaacataacgttgaactggtagcgatcggtaacggtacagcttcccgcgaaactgagcgtttctatctcgatgtgcagaagcagttcccgaaagtgaccgcgcagaaagtaatcgtcagcgaagcaggcgcgagcgtttacagcgcttccgagctggctgcacaggagttcccggatctcgacgttagcctgcgtggcgcggtgtctatcgcccgccgtttgcaggatccgctggcggagctggtgaaaatcgatccgaaatctatcggcgtaggtcagtatcagcatgacgtcagccagacgcaactggcccgcaaactggacgcagtagtagaagactgcgtaaacgccgttggcgtcgatctcaacactgcttctgttccgctgttaacccgcgtggcgggcctgacgcgcatgatggcgcaaaacatcgttgcctggcgcgatgagaacggtcagttccagaaccgtcagcaactgttaaaagtgagccgtctggggccgaaagccttcgagcagtgcgcgggcttcttgcgcattaaccacggtgataacccgctggacgcgtctaccgttcacccggaagcctatccggtggtggaacgcattctggcagcaacacagcaggcactgaaagatctgatgggtaacagcagcgaactgcgtaacctgaaagcgtctgactttactgatgagaaattcggtgtgccgacggtaaccgacatcatcaaagagctggaaaaaccgggtcgcgatccgcgtccggaatttaaaaccgctcagtttgccgatggcgtcgagacaatgaacgacctgcaaccgggtatgatcctcgaaggcgcagtgaccaacgtcaccaactttggcgcgtttgtcgatattggcgtgcatcaggacggcctggttcacatctctagtttgagcaacaagtttgtggaagatccgcataccgtggtgaaagcgggcgacattgtgaaggtgaaagtgctggaagtggatcttcagcgtaaacgtatcgccctgactatgcgcctggatgagcagcctggcgaaaccaacgctcgtcgcggcggcggtaatgaacgcccgcaaaacaaccgcccggcagccaaaccacgcggtcgtgaagcgcagcctgccggtaatagcgcgatgatggatgcgctggcggcggcaatgggcaaaaaacgttaaacgcccgtactggcctacggttcgaatttgcacgaaatcgtagggcagataaggcgttcacgccgcatctggcaacgaacgccttgcctgacataaaagtgccggagaatatctccggcatttttattccacagccaaactcataatatattccggcaatatttatcatttcattaacaactgaaaccttaattaaacattagccagtccgggtaattcactattcgaattatattttcgctgcgatataaccttgagccacatcaacattgagtcagattattattcaaaccaacattcgcacacattttaagtattgctgatagaaaccattctcattatcattgtgttgttgattatttaatctctcctttgttggcaaatcatctggtctcatgtcgctgtcaaacgccccatgaggtagttatccagttaatgagaaacaagtaggcacctatgcaatacactccagatactgcgtggaaaatcactggcttttcccgtgaaatcagcccggcatatcgccaaaaactgctttctcttggcatgttacctggctcctcttttaatgtggtgcgcgtcgctccactcggcgaccccattcatatcgaaacccgtcgtgtgagcctggtattacgcaaaaaagatctggccttattagaagtggaagcggtttcctgttaatacggtgataacaacaatgaaaaaattaaccattggcttaattggtaatccaaattctggcaagacaacgttatttaaccagctcactggcagtcgtcagcgtgtaggtaactgggctggcgttaccgtcgaacgtaaagaagggcaattctccaccaccgatcatcaggtcacgctggtggacctgcccggcacctattctctgaccaccatcagtagccagaccagcctcgatgagcaaatcgcctgtcactacattttgagtggcgacgccgacctgctgattaacgtggtggatgcgtctaaccttgagcgtaacctgtacctgacgctacaactgctggaactcggcattccctgcattgtggcactgaacatgctcgacattgccgagaagcaaaatattcgtattgaaattgatgctctgagcgcgcgtctgggctgtccggtgatcccgctggttagtacccgtggtcgcggtattgaagcgctcaagctggcgattgatcgctataaagctaacgagaatgtggaactggtgcattacgcacagccgctgctcaacgaagcagatagtctggcaaaagtgatgccttccgacatcccgctgaaacaacgtcgctggctgggcctgcaaatgctggaaggcgatatctacagccgcgcctacgccggtgaagcgagccagcatctggatgccgccctcgcccgtctgcgtaatgagatggacgatccggcgctgcacattgccgatgcgcgttaccagtgcattgctgccatctgtgatgtggtaagcaacaccctgacggcagaacccagccgtttcaccactgcggtagataaaatcgtgctcaaccgtttcctcggtctgccgattttcctctttgtgatgtacctgatgttcctgctggctatcaacatcggcggggcgttacagccgctgtttgacgtcggctccgtggcgctatttgtgcatggtattcaatggattggctacacgctccacttcccggactggctgactatcttcctcgcccagggcctgggtggcggcattaacaccgtgctgccactggtgccgcagattggcatgatgtacctgttcctctccttccttgaggactccgggtatatggcgcgtgcggcgtttgtgatggaccgtctgatgcaggcgctgggcttgccggggaaatcctttgtgccgctgatcgtcggtttcggttgtaacgtaccgagcgtaatgggtgcacgtacgcttgatgcaccgcgtgaacgtctgatgaccatcatgatggcaccgtttatgtcctgcggcgcgcgtctggctatcttcgcagtattcgcggctgccttcttcgggcagaacggtgcgctggcggtcttcagcctgtatatgctgggtattgtgatggcggtgctgactggcctgatgctcaagtacaccatcatgcgcggtgaagcgacgccgtttgtcatggagttgccggtctatcatgtaccacacgttaaaagcctgattatccagacctggcagcgtctgaaaggcttcgttctgcgtgctggtaaagtgatcatcatcgtcagcattttcctgagcgctttcaacagcttcagcctgagcgggaaaatcgtcgataacatcaacgacagcgcgctggcgtccgtcagccgggtgatcaccccggtcttcaagccaattggcgtgcatgaagataactggcaggcaacggttggcctgtttacaggtgccatggcgaaagaagtggtagtgggtacgctcaacaccctctacaccgcagaaaatattcaggacgaagagttcaatccggcagaatttaacctcggtgaagagctgttcagtgcgatagatgaaacctggcagagcctgaaagacaccttcagccttagcgtactgatgaaccccattgaagccagcaaaggcgacggcgaaatgggtaccggggcgatgggcgtgatggatcagaaattcggtagcgcagcagcagcttacagctacctgattttcgtcctgctgtatgtaccatgtatcagcgtgatgggggctatcgcccgtgaaagtagccgtggctggatgggcttctccatcctgtgggggctgaatatcgcttacagtctggcaacattgttctatcaggtcgccagctacagtcagcatccaacttacagcctggtgtgcattctggcggttatcctgtttaacatcgtggttatcggtctgctgcgccgcgcgcgtagccgggtggatatcgaactgctggcaacccgcaagagcgtaagcagttgctgcgcagccagcaccaccggtgattgccattaatggctagtcttattcaggtgcgcgatttgctggcgttacggggccgtatggaagcggcccagataagccagacattgaacactccacagccaatgattaacgccatgctgcaacaactggaaagtatgggcaaagccgtgcggattcaggaagaacctgacggctgcctctctggcagttgtaaaagctgcccggaaggaaaagcctgtctgcgcgagtggtgggcgctgcgttaaccttactccatcgcctgttttggaaagcccggtatgcgtctgcatccgggcttttttgcgtgcggctttccataaaaatgcaactcttgcagcacggcgtaagttcctttgaaagcatctcgcagggatgaaaactcgctaatacacaggtgtggagtggcgcgtagagtcgcggcattcaaacaacaggtgaaggaacgccatgagcaaaaagcagagttccaccccacacgatgcgctgttcaaactctttttacgccaaccggacacggctcgtgattttcttgcgtttcatttaccggcacccattcacgcgctttgtgatatgaaaaccctcaagctggagagcagcagctttattgatgacgatctgcgtgaaagctattccgatgtgctgtggagcgtgaaaacggaacaaggaccaggatacatctattgtctgattgaacatcaaagcaccagtaacaaactgatcgcatttcgcatgatgcgttacgctattgccgcaatgcaaaatcaccttgatgctggatacaaaacgttgccgatggtggtgccattgttgttttaccacggtattgaaagcccctatccctatagcctgtgttggctggattgtttcgccgatcccaaactggcaaggcagctttatgcctccgcatttccgctgattgatgtcaccgtcatgcctgatgatgaaatcatgcagcaccgacgtatggcgctgctggagttaattcaaaaacatattcgtcaacgcgacctgatggggctggtagagcaaatggcctgcttattaagtagtggatacgctaatgacagacaaatcaaagggctgtttaattacatactgcaaactggcgacgctgtacgttttaacgattttatcgacggcgttgccgaacgtagtccgaaacacaaggagagtttaatgactattgcggaaagattgcggcaggagggggaacaatccaaagccctgcatatagccaaaataatgcttgaatccggagttcctcttgcagacatcatgcgctttaccgggctgagtgaagaagagttggctgcggcgagtcagtaaagttctgtctcgccatttcaaaagccacttacaccctctgcttcaacgccaccagcaggtgacaaaactcggccggatggctaataaatggcgcatgggccgctttggcgaagatataactttcgctgtgaggccaaagtttatccagcatcggcaccactttgcgcggcaccagaccgtcgagatagccatacaatcgcaaaaacggcatggacacgttttgcagcggctgacggagatcgaccgttttcaggatttccagcccgccattaagcacgtcaacctccggcatcggtaacgccagaacggttttcttcaacgcccgcgcatcctggcgcgccgtttcagtccccatggtttgtaacgccaggaaccgctccactgtacgctgaaaatcatcactgagttgctgctgaaatcccgccagcacgtccggttttatccccggccactcgtcacgagcactaaaacaaggactgctcgccacggtgaccagcgcctgaacacgctcgggatgggttaacgcaatctggcttgccaccagcccgcccagactccagcctaaccaaatggctttatcaggtgcctgttgcagcacggcttcggccatatcagcaagactcagcgcaccaaatccccggctacgcccgaagccgggcaggtcaacaaggtgcagcgtaaaatggctgctaagttcctcgtcaatgcaacgccacacttcggcattcagtccccatccgtgcagcagcacaagatgaacattcccctgacctttggtctgccaccagatgttattcatccgctattgttctcttttgacttacaaggatgaacatatgctaacagtaccgggattatgctggctatgccgaatgccactggcgttaggtcattgggggatttgtagcgtctgtagtcgcgccacccgcacagataaaacgttatgcccacaatgtggattacccgccacacactcccatcttccctgcggtcgctgcctgcaaaaaccgccgccctggcaaagactggtcacggttgccgactatgcgccgccgttaagtccgcttatccaccagcttaaattttcccggcgcagtgaaatcgccagcgccctgagtcgtctgttactattggaagtcttacacgctcgtcgcaccaccgggttgcaattgccggatcgcatcgtcagcgttccgttatggcagcggcgtcactggcgtcggggatttaatcagagcgatttgctgtgtcagccgttaagtcgctggttgcactgccaatgggatagcgaagccgtcacacgtacacgggccactgcgacccagcattttctcagtgcccggctgcgcaagcgcaacctgaaaaatgcctttcgtcttgaattgcccgtgcaaggtcgccatatggtgattgtggatgatgtcgttaccaccggaagtaccgtcgcagagattgcgcagttgcttttacgcaatggtgcggcggctgtccaggtctggtgcctttgtcgaaccttgtaaagcctcgatgatgggcgtattataaccaactaaaatagtcaactattaggccattactatgatccgtatttccgatgctgcacaagcgcactttgccaaactgctggcaaatcaggaagaagggacacaaatccgcgtatttgtgattaaccctggcacgcctaacgctgaatgtggcgtttcttattgtccgccggacgctgtggaagccaccgacacagccctgaaatttgacctgctgaccgcgtatgttgatgagttaagcgcaccatacctggaagatgcagagatcgattttgttaccgaccagttgggttcccagttaacgctgaaagccccgaacgccaaaatgcgtaaagtggcagacgatgcaccgctgatggagcgcgtggagtatatgctgcagagccagatcaacccacagcttgctggtcacggtggtcgcgttagcctgatggaaatcaccgaagacggttacgccattctgcaatttggcggcggctgtaacggttgttccatggtcgatgtgacgctgaaagaagggatcgagaagcagctgctgaacgaattcccggagctgaaaggtgtgcgcgatctcaccgaacaccagcgcggcgaacactcctactactaagttatcccctcttttgtagattgcccgatgcgacgctaaagcgtcatttcgggcctacgttgaacatgtgccagacgttggcgcagcattgctttgtcaaatcctcggttcgtttccccgcgataatatgaccaacctctcataatttaaatttaccccgctctggtgattctcaaacgccagatgttacccgtatcattcacatgggtaccaaacatactcctgacatctgactacaataattagttttagtgggtatcagtcgtggtgccgcaatatctctgttcccgattgggataattagagtttgtcgtcagaaaattgacgttacccataacaaatgaaaggccaggtaaatcatgccattagtcattgttgctatcggtgtaatcttgttgttgctcctgatgatccgcttcaaaatgaacggcttcatcgctctcgtcctcgtggcgcttgctgttggattaatgcaaggaatgccgctggataaagttattggctccatcaaagccggtgtcggcgggacgctcggtagccttgccctgatcatgggttttggcgcaatgctgggcaaaatgctggcagactgcggtggcgcacaacgtatcgccaccacgctgattgccaaatttggtaaaaaacacatccagtgggcggtggtactgaccggttttaccgttggttttgccctgttctatgaagtgggctttgtgctgatgctgccgctggtgtttaccatcgcggcttctgcgaatattccactgctgtatgttggtgtaccaatggcggctgcactgtctgtgacccacggcttcctgccaccgcatccgggtccgactgcgattgccaccattttcaatgccgatatgggtaaaaccctgctgtacggtactattctggcaatcccgaccgtgattctcgccggtccggtttacgctcgcgtgttgaaaggtatcgataagccaattccggaaggtctctacagcgcgaaaaccttcagcgaagaagagatgccgagctttggcgtcagcgtctggacctctctggtgccggtagtactgatggcgatgcgtgcgattgccgaaatgatcctgccgaaaggtcacgctttcctgccggtagcggagttcctcggtgacccggtaatggcaacgctgattgccgtgctgattgcgatgttcacctttggtctaaaccgtggtcgtagtatggatcagattaacgacacgctggtttcttccatcaaaatcattgcgatgatgctgttgatcatcggtggtggcggtgcgttcaagcaggtgctggtagacagcggcgtggacaaatacattgcttccatgatgcacgaaaccaacatttctccgctgctgatggcctggagcattgctgccgtactgcgtatcgcgctgggttccgcaaccgttgcggcaatcactgcgggtggtatcgcggcaccgctgattgcaacgacgggtgttagcccggagctgatggttattgcggttggttccggtagtgtgattttctctcatgtgaacgatccgggcttctggctgttcaaagagtactttaacctgactatcggcgagaccatcaaatcctggagcatgctggaaaccattatcagcgtgtgcggtctggtaggctgtctgctgctgaatatggtgatttgataacactgactgccggatgcggcgtgaccgccttatccggcctacgattcgggatgaattagtaggccggataagacgcgtcaagcatcgcatccggcatcaaccgcactttacttcttcttcgctgcagctctgcgccgtctgtccaaatccttcagcaacttgttcacgccatcatcggcaaacatgctctcaagcgttgcggaaagcttgcgtcgccagtttttatactggtaactggtgccaggaatattcaccggttcggccatatccagccagtcttccggctgtagtcctaacagagcactgttactgtcggcaatgtagcgctgcaaaccacggttcagcgtcggcgtcatgctcatcaagcttgccttatgcccggcacgtttcggcagacaaccatatttatgcagtgcatccagcagcccttgcttcgccagttcgcgatcctgatacagaccgcgcagtaccacttcatccggatacagccccagggttttgcccagcgttagatccccgcactcccagtaaccgcgcagcgttggcaggtcatgtgtcgccgcaaccgccatgctctgctccggatacgctttcggtgcacggaacgtcttctcgtggtcgttttcgaaatagagcactttgtaagagtacacaccgctgctgcgcagcttaccgacaatctctaccggtacggtaccgagatcttcaccaatcaccatacagcgatgacgtttactttcgagtgccagaatgctgagcagatcatccaccggatagtgaacatacgcgccctgatctgccgtctcgccatacggtatccaccacaaacgcagcatgctcatcacatggtcaattcgtaatgcgccgcagttttgcatattggcacgcaacagctcgataaacggttcataggcacgcgcggtgatgatatgcgggtccattggcggtaatccccagttctgccccaacgggccgaggatatccggcggcgcgccaacgcttgctttcaggcaatatagttcacggtcacaccaggtttccgccccaccttccgctacgccaaccgccagatcacgatacaagccaatcggcatttcatagccctggcttatctcccagcaggcggcaaactggctgtaagccagccactgcaaccagagataaaaatcgacgtcatcacgatgttcttcgcagaactgacgcacttctggactatccacgttctgatacatctctggccatgcaggccagccccagcgcatttcgtcctctttcacttgctgggcatgtagcgcatcaaaggctgcctgccagaacaggctgtcgccctgctctgcaacaaactggcgaaacgcggccatctgctcatcatcacgttgcgcgaaacctttccacgccattcgtaatgctgtcatttttagggcggtaaccgtggagtaatcgacccagtcggcatcgcgcgcctgttgcagcgtctgttgcgtggtcggcaactgccaccaggcctgagcctcttcgctaagatggaaatcttcaacggcgttaacgtcgatataaatcacattcagccaacggcgagaagacgggctgtatgggctggcgctctccggatttgccggatagagcgcatgaatcgggttcaggccaatgaagctcccgccacgttttgccacatccaccagcatcgctttgagatcgccaaaatccccaataccccagtttttttcgcttcgcagcgtataaagctgaacgcaggcaccccacagcttttgtttattcagcaacgcctgcggttcgtaacagcgtttcggggcgacaatcacccggcaatgcgcgcgctggtcgtcctgggtgagtgtcagcgtgtgataaccttccggcagcttcgtcggtagattgaacgctttgccccccgttacatggcctttgtactgcgttccttcttcggtggtcagcagccagctatattcgccgctgccctccaccaccatcggcatttttttgccgctggtataaaccatgacattcgggactggcgttaccgccactttcgtggcggtacgttgatgcatcgcgtcaagcaaacgccgtttggtttcggcgctaatgctctgcggtttaccgtgggcattgatgtaattggggctaatccccgccgccagcgcggcattatccagacgtttgctttccatcgagcttccttagcgttttgcctgccagatacgagcctgataatcgcgaatagagcgatcgctgctaaacataccgcagcgggcggtattgaggatcgccgcgcgagtccaggcctcctggtcgcggtacagcacatccacctgcttttgtgcctctacataggctgcgaaatccgccatcaccagatacggatcgccgccctgtttgccgatactgtgcagcatctggtcgaaggcatgcttatcgccgtcgctgtatttaccgctttccagctctttcaatactgcgtccagcaccttatctttcttccgccatttcaccgggtcgtagcctttggccagaattgccttcacttgttccacggtatgaccaaaaataaagatattttcttcaccgactttctcggcgatttcaacgttcgccccatccagcgtaccgacagtaagcgcaccattgagcgccagtttcatattgccggtaccggaagcttctttacctgcagtgctaatttgttcggagatatccgccgccgggatcagtttttccgccgcgctaacgcaataatccggcaggaacaccaccttcaacttatcgccaaccagcggatcgttgttgatcacgtcagccactttgttgatcgcaaagataatattcttcgccaggtagtagcccggtgccgctttcgcgccgaagaggaagacgcgcggtacgcgatcagcctgcgggttttcacgaatttctttgtacaacgccagaatatgcagcagattcaggtgctggcgtttgtactcatgcaaacgtttgatctgaatatcgaaaatcgcctgtggattgatctcaataccggtacgaactttcacaaactccgccagacggactttattcgcctgcttgatctcgcgatattgctgacggaatttcgcatcatcagcgaatttttccagattgatcagctgatcgagatcgttagcccactctttttgcagacttttatccaacagagccgccagtgccgggttgcactgtttgatccagcgacgtggggtaataccgttggtgacgttatggaatttgttcggccatagctggtgatattccgggaacagatctttcaccaccagatcgctgtgcagcgccgcaacaccgttcaccgcgaaaccgccaaccacacacaggttcgccatatgcacttgtttgtcgtgcaccaccgccagtttggcccacactttttcatcgcccggccaggttttctctaccagcgttttaaagcgagtattaatttcgttaataatctgcatgtggcgcggcagtaagcctttcaccagtttcacatcccagcgttccagcgcttctggcatcagggtatggttggtgtaagcgaaagttttgctggtaatggcccaggcgtcatcccagctcatctggtgctcatcgatcagcacgcgcagcagttctggaatcgcgatagttgggtgggtatcgttcagctgaataacttcgtaatccgccagttcgtgcagtttacgccccgccagatgatggcgacgcaaaatatccgctacgctacaggcacactggaagtattgctgcatcaggcgcagctttttaccggcagtatggttgtcgtttggatagagaactttggtcagtttttccgcattgatgccctgctgttcggcacgcaagaaatcaccgtcgttaaatttagtcagatcaaacggatgcgcgtgcgtcgcctgccacagacgcagcggctgcgccacgccattacgatagccgacaacggggagatcccacgcttgaccggtaatggtaaactccggctcccagcgtccgtctttcgtcactttaccgccaatccctacctgcacatccagtgcttcgttgtggcggaaccacgggtagttactgcgatgccagtcatccggcgcttcaacctgtttgccatcgacaaaagactggcggaacaaaccatattgatagttcagaccgtaacccgtcgcagactgaccgacagttgccatactgtcgaggaagcacgccgccagacgtcccagaccaccgttacccagcgccgggtcgatctcttcttccagcaggtccgtcagattgatgtcataagccttcaagctatcctgtacatcctgataccagccgagattcaacaggttgttgcccgtcaggcgaccaatcaaaaactccatactgatgtagttaacatgtcgctgattcgccaccggcttggcgaatggctgagcacgcagcatttcggccagtgcttcactcactgctagccaccactggcgaggagtcatttcagccgcagaatttaagccataacgctgccactgacgactaagcgcttcctgaaattgcttatcgttaaaaataggttgactcataggagttccacttttcttagattttcaacacaacgttatcgctagtttgccaggctcgatgttgaccttcctcatcctgcgggggattaggcagggaggagttgcggggatgagcaaggaaatgtgatctcaaccacttaaagctagtgcaaaccacaggattagcatcaaatcaatgcaatacagcgcagaaaatctgtatctaagtgcaaaaaatggccgttgcgtattttcaaaaagcggaaggtaactctataaattaagtaaaggagtgaaacagtttcataagtaaaatatccagtgtgctccatctcattcttaatagatttattaagatcatctttttagatggcactttcatcaggaatgaagaagaaacccttgcttaaatgaatctgatgaacataagggaaaccagtattcacgctggatcagcgtcgttttaggtgagttgttaataaagatttggaattgtgacacagtgcaaattcagacacataaaaaaacgtcatcgcttgcattagaaaggtttctggccgaccttataaccattaattacgaagcgcaaaaaaaataatatttcctcattttccacagtgaagtgattaactatgctgattccgagtaaactaagtcgtccggttcgactcgaccataccgtggttcgtgagcgcctgctggctaaactttccggcgcgaacaacttccggctggcgctgatcacgagtcctgcgggctacggaaagaccaccctcatttcccagtgggcggcaggcaaaaacgatatcggctggtacagcctggatgaaggtgataaccagcaagagcgtttcgccagctatctcattgccgccgtgcagcaggcaaccaacggtcactgtgcgatatgtgagacgatggcgcaaaaacggcaatatgccagcctgacgagtctcttcgcccagcttttcattgagctggcggaatggcatagcccactttatctggtcatcgatgactatcatctgatcactaatccagtgatccacgagagtatgcgcttctttattcgccatcaaccagaaaatctcaccctggtggtgttgagtcgcaaccttccgcaactgggcattgccaatctgcgtgttcgtgatcaactgctggaaattggcagtcagcaactggcatttacccatcaggaagcgaagcagttttttgattgccgtctgagtagcccgattgaagccgcagaaagcagtcggatttgcgatgacgtttccggttgggcgacggcactacagctaatcgccctctccgcccggcagaatacccacagtgcccataagagcgcacgccgcctggcgggaatcaatgccagccatcttagcgattatctggtcgatgaggttttggataacgtcgatctcgcaacgcgccattttctgttgaaaagcgccattttgcgcagtatgaacgatgccctcatcacccgtgtgaccggcgaagaaaacgggcaaatgcgcctcgaagagattgagcgtcaggggctgtttttacagcggatggatgataccggcgagtggttctgctatcacccgctgtttggtaacttcctgcgccagcgctgccagtgggaactggcggcggagctgccggaaatccaccgtgccgccgcagaaagctggatggcccagggatttcccagcgaagcaattcatcatgcgctggcggcaggcgatgcgctgatgctgcgcgatattctgcttaatcacgcctggagtctgttcaaccatagcgaactgagcctgctggaagagagccttaaggccctgccgtgggacagcttgctggaaaatccgcagttggtgttattgcaggcgtggctgatgcaaagccaacatcgctacggcgaagttaacaccctgctagcccgtgctgaacatgaaatcaaggacatcagagaagacaccatgcacgcagaatttaacgctctgcgcgcccaggtggcgattaacgatggtaatccggatgaagcggaacggctggcaaaactggcactggaagagctgccgccgggctggttctatagccgcattgtggcaaccagcgtgctgggtgaagtgctgcactgcaaaggcgaattgacccgcagtctggcgctaatgcagcaaaccgaacagatggcacgccagcacgatgtctggcactacgctttgtggagtttaatccagcaaagtgaaattctgtttgcccaagggttcctgcaaaccgcgtgggaaacgcaggaaaaagcattccagctgatcaacgagcagcatctggaacagctgccaatgcatgagtttctggtgcgcattcgtgcgcagctgttatgggcctgggcgcggctggatgaagccgaagcgagcgcgcgtagcgggattgaagtcttgagctcttatcagccacagcaacagcttcagtgcctggcaatgttgattcaatgcagcctggcccgtggtgatttagataacgcccgtagccagctgaaccgtctggaaaacctgctggggaatggcaaatatcacagcgactggatctctaacgccaacaaagtccgggtgatttactggcaaatgaccggcgataaagccgccgctgccaactggttgcgtcatacggctaaaccagagtttgcgaacaaccacttcctgcaaggtcaatggcgcaacattgcccgtgcacaaatcttgctgggcgagtttgaaccggcagaaattgttctcgaagaactcaatgaaaatgcccggagtctgcggttgatgagcgatctcaaccgtaacctgttgctgcttaatcaactgtactggcaggccggacgtaaaagtgacgcccagcgcgtgttgctggacgcattaaaactggcgaatcgcaccggatttatcagccattttgtcatcgaaggcgaagcgatggcgcaacaactgcgtcagctgattcagcttaatacgctgccggaactggaacagcatcgcgcgcagcgtattctgcgagaaatcaatcaacatcatcggcataaattcgcccatttcgatgagaatttcgttgaacgtctgctaaatcatcctgaagtacctgaactgatccgcaccagcccgctgacgcaacgtgaatggcaggtactggggctgatctactctggttacagcaatgagcaaattgccggagaactggaagtcgcggcaaccaccatcaaaacgcatatccgcaatctgtatcagaaactcggcgtggcccatcgccaggatgcggtacaacacgcccagcaattgctgaagatgatggggtacggcgtgtaagtttagccggataacgcgccagatccggcttacatctctgcatcattcaatgctcacccgcgttacgccatctgtttctatcaaactaaaccgcaccggcaagaaacgctccaccaccgcgatattggtcagcagatggcaactgggatgggcgaccgtaaattcccccgcgcccgccagcgccatcggtagcaccagttggtcagcaagatattcccccaccgccgccgtgcttgccaggtagcgtttcacctctttcaccaactgtgccgcaaccacctcggcactgacgcgcttttcaccgacgacaaaaaagcgttcggtgatattttcactttcgacttcaaggctgacggtattacccggcccctggtcgcgcggcaggttatgaatattctgttcatgcagggaaaaactccccgccagtgtagcgatttcacgctcagcaacatggcgcggcacaccagctaatagaacttctccacgcatctgcacaatgttcccgcgctcgccaagttgcaaggtgttaaagcttgccacggggctgacttccgttgccaccacaccgcctccggcagggtaaaaaccgtggcgtaacagcgtggtttgctgatgaattcctattttcgccagcagcggctccagcacccggcggataaaatccgcaggcggcgcgctcgggttatcggtgccgccgctcacttcaacacggctaggtccatcggcaaaccacagcgcgggcagcaccgtttgcagcaccagcgtacaacttccggcgctaccgatagcaaagcggtaatcgccgccgcgcacggtgccgggccggaagagcagacgctggctccccagctccgcgccttccacggttgctccgcaaatttccgtcgccgcctttaccgcggtcagatgctggcgcaacagccccggtttcgcccgcccggcacgaatgctggtgatggtaaatggctggccggttatcatgctcaggctcagcgcgctgcgcaggatctgcccgccaccttcgccctgtgcgccatccagcgcaatcatccttttcatcatttatccttttacgcacaccacctgacgcagggtatagataacttccaccagatcgctttgtgccgccatcaccgcatcaatatctttatacgccatcgggatttcgtcgatcacttcggcatctttacggcattccacatgcgcggtggcacgaatttgatcttccacgctgaacagttttttcgctttagttcggctcattacccgcccggcaccgtggctgcagctacagaagctctcttcatttcccagcccacggacgataaagctttttgctcccatgctaccgggaataattccatattgaccagcacgcgcagacaccgcgcctttacgcgtcacgtagatctcttcaccaaagtgctgttctttttgcacatagttgtggtgacagttgatctcttccatcgccagcgtttgtggctgtctgaccgttttctgcgtaatgctctgcaatgccgttaccacgttttccatcatcgcatcgcggttaaggctggcaaaaagctgcgcccaggccacggctttcaggtaatcatcaaagtattccgtaccttccataaagtacgccagatcacggctcggcaacgtctcaagcgtttcctgcatctctttttgtgccagatcgataaagtaagtcccgatggcgttaccaattccgcgactaccggagtgcagcataatccacacctggtcgctctcatcaaggcagatttcaataaagtggttaccggttcccagcgttcccaggtgtttatagttattggtattcaggaaacggggatatttttgcgttaaccactgataaccggcttcaagctcagcccatttagcatcgacgttaacaggtggattttcccaggcacctttatcacgtttacaacggccagtggtacgcccgtgcggcacggccgtttcaatcgcctgacgcagctctgccaggttttcaggcaggtcttccgccgttaacgcggtacgcagcgcgttcattccacagccaatatccacgcccaccgccgccggaataatcgcccctttggtcgggatcacgctaccaatggtggaacctttacccaggtgtacatcaggcattaccgcaatatgtttgaaaataaacggcatcttcgccgtattaataagttgctgacgcgcatcggcctctaccggcacgcctttggtccacatttttaccggggcattttcagtggtcagtaattcgtaattcattttgtttttctcttttcgttgtttgctgtcctgataattgcaaccgtcgtgccagaaaattaaataagcagcttaattttttaattcattgttttaaaaaagattatatctttacgtccgtaaccggagatttcccgcaaagccaatttaccgataatgaaatatcgtcttttataaggatatctaagatgcgtaaaacagtggcttttggctttgtcggtaccgtactggattatgccgggcgcggcagtcagcgctggagtaaatggcgtccgacactctgtttatgccagcaagaaagcttggtcatcgatcgactggaattgttgcacgacgcccgcagccgcagcctatttgaaacgcttaaacgcgatatcgccagcgttagcccagaaacagaagtggtgagcgttgagattgaactgcataacccgtgggatttcgaagaggtctacgcctgcctgcatgatttcgcccgtggttacgagtttcagccagaaaaagaagactatttaattcacatcaccaccggtacccacgtcgcgcagatttgctggtttctgctggcagaagcgcgttacctgcccgcccggctgatacaatctagtcctccgcgcaaaaaagaacagccgcgcggcccaggtgaagtaacgattatcgatctcgatttaagccgttataacgccatcgccagccgctttgccgaggaacgccagcaaacgcttgattttcttaagtccggcattgccacgcgtaacccccacttcaaccgcatgattgagcagatcgaaaaagtggcgatcaaatcccgcgcgccgattctgcttaacggtccaaccggcgcgggcaagagttttctggcgcgacgcatcttagagttaaaacaggcgcggcatcagtttagcggcgcgtttgtggaagtgaactgcgccaccctgcgcggcgataccgccatgagcacgctgtttggtcatgtaaaaggcgcgtttaccggggcgcgggaatctcgtgaaggtttattacgcagcgccaacggcggaatgttgtttcttgatgagattggcgaactgggcgcagacgaacaggcaatgctgctgaaagccattgaagagaaaaccttttacccgtttggcagcgatcgccaggtgagcagtgattttcagcttatcgccggaacggtgcgcgatttgcgccagctggttgccgaaggcaaatttcgcgaagatctgtacgcgcggatcaatctctggaccttcaccctgccgggtctacgccagcgccaggaagatattgaaccgaacctggattatgaagtggagcgccacgccagtctcactggcgacagcgtgcgttttaacaccgaagcgcggcgcgcctggttggcttttgcgacctctccccaggcaacatggcgcggtaactttcgcgaactttctgccagcgtcacgcggatggccacctttgccactagcggacgcatcactctggacgtggttgaagatgagataaaccgtctgcgctataactggcaggagagccgcccctccgcgcttacggcgttgctgggcgcagaggcagaaaacatcgatctcttcgaccgtatgcaactggaacacgttatcgctatctgccgccaggcaaagagcctttccgcagccggacgccagctttttgacgttagccgccagggcaaagccagcgtcaatgacgcggatcggctacgcaaatacctggcgcgttttggtctgacgtgggaagccgtgcaggatcagcacagctccagttgaatatggtggtccgtcagcacctgcatcacgcttactggcggcggggcgtcggtgtagacggcatctaccatgctgatgctgcccatattgaccatcgcgttacggccaaatttcgagtgatcgacaaccagcataacgtggcgcgagttctcaataatggcgcgtttggtgcgaacttcgtggtaatcgaactccagcagcgagccgtcgctatcgatgccgcttatccccagaatgccgaaatcaaggcggaactgggagataaaatcgagcgtcgcttcgccaatgatcccgccatcgcggctgcgtaattcgccaccggcgagaatgatgcgaaaatcttcttttaccatcaacgtgttagcaacgttgagattgttggtgacaatgcgcaaattgctgtgattgagcagtgcgtgcgctaccgcttccggcgtggtgccgatatcgataaacagcgtcgagccattggggatttgctccgccactttgcgggcgatgcgctctttttcttcggtctgggtggccttgcgatcgtgccacggcgtgttaaccgaactggaaggcagcgccgcaccgccatgatggccaggatcaggttttgctccgccagctcattgaggtcgcggcgaatagtctgcgggctgacggagaaatgctctaccagctcttcggtactgacataaccctgctgtttaaccagttcgataataccgttgtgacgttgtgtttgtttcatttataaatccctggaattattttcgttttcgcgcattgaggctatcaacaaaagccatcgctaaacccacggctaacccggcgatgtgtgctccgttcgccatgctcatcccaaacaaatcaaaccatccggcgacaatccagatcagcgcaaagataattaacccacgttgcaggtaaatgccactttgcggatcgcgttcgccacgtagccagacgtagcccatcagcgcatacaccacgccagaaagcccgccaaaccacggcccgctgaatttttgctgcacatagccgcttaacagggcgctgataagcgtaatgacaattagcttaccgctaccgaggcgtttttccaccgcaccgccgagataccaccaccagagcaggttaaagaggatatgcatcaggctgaagtgcattaacgcgtgggtgaagtaacgccagaactcaaatttcagtgttggatcgaatggccaggccagccataacatcacttcctgatcgccgagaatttgcatggcaataaacaccaccacgcaggcgatcatcatcacccaggttaccggacctgcgcgttcacgcaaggcggcaaagaaaggataacggcgataatgcaggccactgccggtatggcctgcctgccagctcgccgccagataacgcggatctgccgggttttcgagaaaacgcgccagctccgcccgtacgcgctcggcctgggactcatccgccagccagacatcgctttggttatgttgttgaatcgtgaggataacaccctgcgtcgccatgtaatcaacaaacgcctgcgccacgcgggggttagcaaaagaggtaatcatcaacatcgttgctgtcgcttattccacacaaaaggggacagtataaagcgttacgcgccgtacgccacctctgcgggaaactgacgttgccaggcttcaaagccgccgtcaatgctatagaccacatcgtagccctgttgcagcagatactgcgccgcgcctttgctgctattgccgtgataacacatcaccatcaccggagtgtcaaagtcgttatcacgcataaaagcgcccagcgtgtcgttggttaaatggaaagcctgcaccgcatgtcccattgcgaaactctgtggatcgcgaatatcgaccagcaccgcctctttttcctgcaacttctggtgcgcgtcggcaacgttaatacattcgaactgatccatgcgtctctctttctttacaaacaagtgggcaaatttaccgcacagtttacgtcgaagcggcagataaacgccataatgttatacatatcactctaaaatgttttttcaatgttacctaaagcgcgattctttgctaatatgttcgataacgaacatttatgagctttaacgaaagtgaatgagggcagcatggaaaccaaagatctgattgtgatagggggcggcatcaatggtgctggtatcgcggcagacgccgctggacgcggtttatccgtgctgatgctggaggcgcaggatctcgcttgcgcgacctcttccgccagtagtaaactcattcacggtggcctgcgctaccttgagcactatgaattccgcctggtcagcgaggcgctggctgaacgtgaagtgctgctgaaaatggccccgcatatcgccttcccgatgcgttttcgcctgccacatcgtccgcatctgcgcccggcgtggatgattcgcattggtctgtttatgtacgatcatctgggtaaacgcaccagcttgccgggaagtactggtttgcgttttggcgcaaatagtgtgttaaaaccggaaattaagcgcggattcgaatattctgactgttgggtagacgacgcccgtctggtactcgccaacgcccagatggtggtgcgtaaaggcggcgaagtgcttactcggactcgcgccacctctgctcgccgcgaaaacggcctgtggattgtggaagcggaagatatcgataccggcaaaaaatatagctggcaagcgcgcggcttggttaacgccaccggcccgtgggtgaaacagttcttcgacgacgggatgcatctgcctagcccttatggcattcgcctgatcaaaggcagccatattgtggtgccgcgcgtgcatacccagaagcaagcctacattctgcaaaacgaagataaacgtattgtgttcgtgatcccgtggatggacgagttttccatcatcggcactaccgatgtcgagtacaaaggcgatccgaaagcggtgaagattgaagagagtgaaatcaattacctgctgaatgtgtataacacgcactttaaaaagcagttaagccgtgacgatatcgtctggacctactccggtgtgcgtccgctgtgtgatgatgagtccgacagcccgcaggctattacccgtgattacacccttgatattcatgatgaaaatggcaaagcaccgctgctgagcgtattcggcggtaagctgaccacctaccgaaaactggcggaacatgcgctggaaaaactaacgccgtattatcagggtattggcccggcatggacgaaagagagtgtgctaccgggtggcgccattgaaggcgaccgcgacgattatgccgctcgcctgcgccgccgctatccgttcctgactgaaagcctggcgcgtcattacgctcgcacttacggcagcaacagcgagctgctgctcggcaatgcgggaacggtaagcgatctcggggaagatttcggtcatgagttctacgaagcggagctgaaatacctggtggatcacgaatgggtccgccgcgccgacgacgccctgtggcgtcgcacaaaacaaggcatgtggctaaatgcggatcaacaatctcgtgtgagtcagtggctggtggagtatacgcagcagaggttaagcctggcgagctaaattaacgtaaggtgatcaggtcagatttcaatctggcctgagactgatgacaaacacaaaactgcctgatgcgctacgcttatcaggcctacgtggtttatgcaatatattgaatttgcatggtcttgtaggccagataagacgttcacgtcgcatccggcatgaacaaagcgcactttgtcaaaaatctaacctactttttaattcagggaattaccgcaaagcccacgccatcatacccaacgtaacaaaactcaggcacgttccccactcgcccgctgaaaaatagcattaatgcgcccagcgccagcataaaaattttgagcagaaggtaaattgttggcgtgataaggatattacaaacttcaataataccggcaagtccgacacccagcatggcaataaccaccgccaaaaattgcgccagtatggggatgccgaaaaaagtcattaccaggctggtcaaaatccattttctgttttgcattattctttccattctttttgaatggtgaaattatactccccgagtccccttgccccttctggacacttttccgaaatgatggcggaaaaaaacgggaccctttggccccgttctatttattggtgaacttacaatctcaccggatcgatatgccagatatgatcggcgtactctttgatagtacggtcagaagagaagtagcccatattggcaatgttcagcatcgcttttgcggtccactcttcctgaagctcgtagagttcatcgactttatcctgacaatcgacatagctgcgataatccgccagtacctggtagtgatcgccgaagttgatcaggctatcaaccagatcgcgatagcgacccggatcttccggactgaatacaccgctgccgatttgcgtcagcacctgatgcagctcctcatctttctcgtagtattcacgcggtttgtagccctgacgacgcagttcttccacttcttccgctgtgttaccaaaaataaagatattgtcagcaccgacatgatccagcatctcgacattcgcaccgtccaacgtaccgatagtcagcgcaccgttaagcgcaaacttcatgttactggtgccggaagcttccgtccctgccaggctaatctgttcagacagatctgccgccggaatgatcaactgcgccaggctaacgctgtagttcgggatgaacacgactttcagcttatcgccaatctgcggatcgttgttgatcactttcgctacgtcattgatcaaatgaataatgtgcttcgccatgtaataggcgctagccgccttaccgccaaaaatattcacgcgcggtacccacttcgcatccgggtcggccttgatgcggttatagcgggtaatcacatgcaacacattcatcaattgacgtttgtattcgtgaatacgtttgatttgtacatcgaacaacgcctttggattcaccaccacattcagctgctgggcgatatactctgccagacgctttttgttctccagcttcgcctgatgcacagcgtgattaaccattgggaaatcacagtgttgttgcagctcattaagcaggctaaggtcggtgcgccagttacggcccaggtgttcgtccagcacggcactaaggcttgggttcgctaccgccagccagcgacgcggcgtcacaccgttggtgacgttggtgaaacgacccgggaagattttcgcaaagtcggcaaacaagctttgcaccatcagattagagtgcagttcgcttacaccgttaactttgtggctcacaacaaccgccagccaggccatacgcacacgacgaccgttggattcatcaatgatgctcgcccgtcccagcagatcggtatcgttcggatactgttcctgcaaggttttcaggaaatagtcgttgatttcaaagatgatctgcaggtgacgcggcagaattttacccagcatatcaaccggccaggtttccagcgcctcgctcatcagcgtgtggttagtgtaggagaagacctgacaacacacctcaaacgcgtcgtcccagctaaattggtgctcatcgatcagcagacgcatcatctcaggaatgctcagtaccggatgggtatcattgagatgaatcgcgattttatccgccaggttatcgtaggttttatgcaactgataatggcggcttaaaatgtcctgaatggtgctggaaaccaggaagtattcctgacgcaggcgcagctcacgcccggagtaggtggagtcatccggatacagtacgcgagatacgttctcggagtggtttttatcttccactgccgcgaagtagtcaccctggttgaatttaccgaggttaatttcgctactggcttgcgcactccacaaacgcagcgtgttggtcgcgtcggtgtcgtaaccagggattatctgatcgtaagcgactcccagaatctcttcggtttcaatccagcgcgtttttttaccttcctgctgaatgcgaccgccaaaacggactttatagcgcgtgttgtggcgtttgaattcccacgggttaccgtattccagccagtagtctgggctctctttctggctaccgttaacgatgttctgcttgaacataccgtagtcatagcggatgccgtaaccgcgccccggcaaccctaacgtcgccagagaatcaaggaagcaagccgccagacgtcccaggccaccgttaccgaggcctgggtcattttcttcatcaatcagctcttcgagatttaaccccatcgcttccagtgcgccctgtacatcttcgtaaattcctaggctcaacatggcgttggagagcgtacggccaatcaaaaactccatgctcaggtagtaaacctgacgagtttcttggctcaactgggcacggttactacgtaaccagcgctccacgagacgatcgcgcacagcaaataacgttgcgttcagccattcatgtttattggcgacgaccgggtcctttccaatcgtaaacatcagcttgtaagcgatagagtgcttaagagcttctacgctaagcgtggggctactatatgtaaacggagcattcatataggcgtttcctgaaaattatttcaagcgatagtaaagctcacggtagctcttcgccgcgacctgccagctaaaatccattgccatagcctgacgttgcacaaaccgccacagactaggacgggaccacagtacaaaagcacgtcgaatagcccgtaacaggctccaggcattactatcttcaaagacaaacccactggcgacgccatctgcaaggttctcaagagaacagtcagaaaccgtatcagcaagcccaccggtgcgccgcactaacggcagcgtaccgtacttcaatccataaagttgcgttaagccgcacggttcaaaacggctgggcaccagaatgacgtccgcgccgcccataatgcgatggctaaatgcttcgtgatagccaatctgaacgcccacctgaccggggtattccgctgccgccgcaaggaaaccttcctgcagcaccggatcgcccgcgccgagtagcgccagctgcccgccctgctccagaagacccggtaaggcttccagcaccaggtcgagacctttctggctggtcagacggctcaccactgcaaaaagcggcactttatcgtcaaccttaagccccattgcgatttgtaactggcgcttattttccgctttatcttccaacgtatcgcgggtgtaacggctggccaacagtaagtccgtctctggactccagattttctcgtccacgccgttcagtacgccggaaagacgcccttcacggtgacgctgttgcaacagaccttccataccgtaggcaaactgcggttcggtgatctcgcgagcgtaggttggactgaccgccgtaatgtgatcggcatagtacagaccggccttcaggaaagagatttgtccgttgaattccagcccatgaatattaaagaaactccatggcaattggatgtcattcatgtgatgtgcataaaacatgccttgataggccaggttgtgcacagtaaacacgctcttcgccggacgcccgcgcgccgccagatacgcaggcgcaaggcctgcatgccagtcgtgcgcatgcaccacatcaggacgccagaatgggtcaagcccgctggccatttctgccccaacccaccccagcagcgcaaaacgcaatacgttgtcggtataggcaaataagttggtatcgtgatacgggcttcccggacgatcatagagatgcggcgcgtcaatcaggtaaatgccaaccccgttgtaatgaccgaacaacagcgtgatatgtccggcgaaggtatcacgacgggatactacctgcgcatcggtcacgccacggcgaatatcgggaaatgcaggcaacagtacgcgagcgtcaacgccgtctgcgatttgtgctgcgggtaatgccccaataacatcagccagaccgccggttttaagcagcgggaacatctcactacatacatgtaaaacctgcattatcgctcctgtttatgccctaacttccgtagcatttcgcgcgttaccagcacgatgccttcttcactacgatagaaacgacgtgcatcttcctctgcgttttcaccaatcaccatgccttccggaataacacaagcacgatcgatgacgcagcggcgcagacggcagctgcgacctacccatacttccggtaacaatacggcggaatcaatgttgcagaaactattcacgcgaacgcggctgaacagaacggactgcaccaccacgctaccggagatcacacaaccgccggaaaccagactgttaagggtcatcccgtggctaccggagcgatcctgcacgaatttcgctggcggtaaactttcattgtaggtgcgaattggccaattgcgatcgtacatatccagttccggcaccacagaggccagatcgaggttcgctttccagtaagcttccagcgtacccacatcgcgccagtacggctcggcatccgggtcggattgtacgcaagagagcgggaacgggtgcgcataggccagaccggcttcggtgatcttgggaatcaaatctttgccaaagtcgtggctggagttctcatcgcgatcgtcttcttccagcagttcatacagatagtcggcgtcaaagacgtagatacccatactcgccagagatttgctcggatcgttcggcatactcggcgggttagcaggtttttcaacgaattcgataattttatcgttctcatcaaccgccataacgccaaatgcggaggcttcttcaatcggtactggcatacaagcaacggtgcaacgtgcgcctttttcgacgtgatcgataagcatacggctgtagtcttgcttgtagatatggtcgcccgccaggatcaccacgtattccgctttataacggcggataatgtcgaggttttgggtgaccgcatctgcggtgccgcgataccagttttcccctttcattctctgctgtgctggcagcagatcgacaaactcgttcatttcttcattgaagaaactccagccgcgctgaatgtgctgcaccagagtgtgggactggtactgggtgatcacgcccatacgacggatcccggagttgatgcagttagacagcgcaaagtcgataatgcggaacttaccgccgaagtgtacggccggttttgctcgcttattggttaaatccttcaggcgggtaccacgtcctcccgccagtatcagggcaacagatttcaatggcagctggcgcgccaacattaagtgatcgttcttctctaaactaaccatgactaactccttttttatcatctctggaacacacacaatccgtgtgcaggtccctgccagacagccgtaatcactgggttatcctctccagcgaatgggggaatggcgtgccactccccagcaggtaaaacaatctctgttacctcaagcgtggcgttaattgcgatcaaaaagcgatcgctgagcagaatttgcagctgtttcggcccgttttgccactcatccgtgcttaaaggttgagcatatcgatttagccaacggacattgccgtcgccttcttcccaccagcgattctccaccaaagcgggaatgcgcttgcgcagatggattaacgcggcggtaaatgcggttaaaccactgcttgcctggctccagtccaaccaggttaattggttatcctgacagtaggcattgttattgccatgctggctgtgaccatgttcgtcaccggccagtaacatcggcgtaccctgggagagcaacaacgttgttaacagggcgtgaatgctgtcgcgccgccgttcaaccaggtcaagagaaccgcctaacccttctttaccatgattgttactgtaattgttgttggtcccgtcgcgattttcttctccgtttgcttcattgtgtttatggttgaagcaaacgcagtcgcgaagcgtaaaaccgtcatgcgcggtgacgagattaatcgcggcactcggcagacgaccattacgtttaaaaacatcgctggaggcagcaaaacgcccggcaaacgcccccagaggcaaatcataatgtagccagaaacgacgggcagcatcgcggaaatgatcgttccactcggcaaacagcggcgggaaatttcccacctgataaccaccaggagcgatatcccacggttcagcaattaacttcacctggctgagcaccgggcagttctggatagcggtaaacaacggcgcatcctgacggaactctggcgtacggcccatgactgccgccagatcaaagcggaaaccatcgacgtggcaggtttctacccaataacgcaggcaggcgctggcataatccaccaccgccggatgactcaaattgagcgtgttgccgcaaccggtccagttgtgataatcgccgtcttctcttatccaataatagctacggttatcgatcccacgcaggctgaataacgggccgtcgaggtccagttccgcactatggttgagcacgatatcaagaatgacttcgatacccgctttatgcagtgctttgattgcatcgcgaaactcatccagcgccgtttctgggctgcaggcatacgccggatgcagcgcaaacatcgccaccgggttgtaaccccagtagttacttagccccatgcgttgcagacgtggttcactggcaaactgcgccactggcagcagttccagcgcggtaatgcccaattgtttcaaatagttgatcatcaccggatgcccgagggctttataagtgccacggatctcgaccgggatctccgggtgcaagtacgttaatcctttgacatgggcttcataaatgatggtgctgccccacggcgtgcgcggcggggcatcatcttcccagtcatagtgatcaaccaccactacgcatttcggcgcaatggcggcgttgtcgcgatagtcaggttcattatgaccggcgtgcagcagcgggttatctttaaactccccgtcaatttgccgcgcgcaaggatcaatcaacaacttcgccgggttaaagcgatgcccctcggcgggttgccaggggccatgaacgcgataaccataacgcaaacccgggcgcgcatccggcagataaccgtgccaaatgtcgccactgtgccctggcaagtcatagcgatgttcctggccattggcgtcaaagacacacagttctacccgctcggcatgagcggagaaaagtgtgaagttgacgccctgaccgtcgtaatgcgcgccgaggggagcgggtttgccaatggcgagttgtgtcattctgcctcccgaaccagccagatagtggccagcggtggtagcgtcaggcttagactatgctgacgaccgtggctggcaatctcatcgctgtgtaccgtgccgccattgcctgcattactgccgtgatagtgcatggaatcggtattgaggatttcacgccatttgcccggctggtttatgccgaagcgataatcatgacgcggtaccggcgtaaagttactggcaacgatgatttcgttaccctctttatcgcgacgcacaaagatcagcacgctgcgttctttgtcatccaccaccagccattcaaagccgtacgggtcaaaatccagttcatgcattgctttatggtggcggtaggtgaggttcagatcgcgcaccagacgctggacaccgtggtgccagttatcgccgccttccaacagatgccagtcgaggctggcgtcatggttccactcgcggccctgggcaaattcgttacccatgaacagtagtttcttgcccgggaatgcccacatccagccatagtaggcgcgcaggttcgcgaatttctgccatgcgtcgcccggcatgcggtcgagaatgctttttttaccgtggaccacttcatcatggctcaacggcaggacgaagttttcagtgtagttgtagagaatcccgaaggtcagtttatcgtgatgatactgacgataaaccgggtcgagcttcatgtagtccagggtgtcatgcatccagccgaggttccacttgtaccagaagcccagaccgcccatatcctgcggacgagaaacgccagggaaatcggtagactcctcagccattgtcaccgcaccggaaacctgctcaccaagaatacggttggtattacgcaagaattcaatcgcttcaagattctcgcgcccgccaaattcgttcgggatccactccccctctttacggctgtagtcgcgataaatcatactcgccaccgcatcgacgcgcagcgcatcaataccaaaacgttcaatccagtaaagcgcgttaccgacgaggaagttactgacttcacggcgaccatagttgtagatcagcgtgttccagtcctgatgatagccttcacgcggatcgctgtgttcatacaagttcgtgccatcaaattcggcaagcgcaaagtcatcagtcgggaagtggcctggcacccagtcgagaatcacgttcagaccagctgcgtgtgcggcatcaatgaaataacggaagtcgtcgcgagtaccaaaacggcgggttggcgcatacaggccggttggctgataaccccaactgccatcgaagggatgctcgttaatgggcagtagttcgaggtgggtaaagcccatccatttagcataaggcaccagttgatcggccagctcgcggtagctcaaccagaaattgttgtcggtgtggcgacgccaggaacccaggtgaacttcataaatagagattggcgcatcaaactgattcgcttttttgcgctcttcagtctgtacaaccttttccggcagcccgcaaataagagacgcggtttccgggcgcatttgcgcttcaaaggcataagggtcggacttcagacgcaagttgccattggcatcaatcatctcgtatttatagagctgaccgttatgcgccccagggataaacagttcccagatgccgctctctttacgcaggcgcatcgggtgacggcgaccgtcccagtagttgaattgcccaaccacgctgacccgacgggcgtttggagcccagacagagaaacgcgtacctgtgacgccatccatagtatctgcatgcgcgcctaaggtttcatacgggcgcaggtgagtaccttcagataatagccaggcatccatttcctggattagcggaccaaaacggtaaggatcatcaatcaggttttgctgaccatgccagacaacagccaactgatagcggaaaaaattcttacgtcgcggaatgacgccgctaaagaatccccgactgtcgagacactccagttttgcgagtttgcgcccggttttcggttcaatcacccacacatcggtagcgtcgggtaaaagggcacggacttccagtcccgcggtggttttatgcattcccagtacggaaaaaggatccgcaaaatggcctgcaattagcgcgttaatcacgtctctatcgatacgatcggacatgcttgtcttcctgttttattgtgtcaccccatccaattggatttttgacttctggttgtgacatttttttgacctgaacggcgcagcactctgtgcatcctctctgcgtcgtcctcacttcaggtaaggctgtgaatactcatgtattcagccacccttaaagaatagccaatgctctatttaactcccggtaaatcatgaaacatctgcgcttactcctgtattacgcactaacaggggcggcatcgcgccccagatttaatgaataaagattacgccagttgacgaagcatccgacgcagcggctccgcggccccccacagcagctggtcgcccacggtaaaggcactcaggaactctggtcccatattcagcttacgcaggcggcctaccggcgtggtcagcgtgccggtaacggcagctggggttagctcacgcatagtgatttcccgatcgttcggaacgactttcgcccacggattgtgcgcagccagcagttcttccacggtcggaatagacacatcttttttcaatttaatagtgaatgcctggctgtggcagcgcaatgccccgacacgcacacataaaccatctaccggaattacggaagatgtgttgaggatcttgttggtttccgcctgccctttccactcttcgcggctctgaccgttatcgagctgtttgtcgatccacggaatcaggctacccgccagcggcacgccaaagttatccaccggcagctcaccgctacgggttaaggttgtgactttgcgttcgatatcgagaatagcagaggacggggtcgcgagttcatctgccacatggccatacagatggcccatctgggttaataactcacgcatatgtcgcgcaccaccgccggaagcggcctggtaggttgcaacggacacccaatcaacaagatcattggcgaataaaccacccaagctcatcaacatcaggcttacggtacagttaccgccaacaaaagtcctgatgccattatttaatccgtcggtaatgacgtcctgattgacggggtcaagaatgatgatggcgtcatctttcatgcgcagagagcttgctgcgtcaatccagtaaccttgccatccgctttcacgaagctttggatagatttcgttggtataatcgccgccctgacaggtcacaatgatatcgagggcctttagcgcctccagatcaaaggcatcctgaagtgtgccagtggttccgccaaaagacggcgcagcctggccaagctgagaagtagaaaagaagacagggcgaatggcgtcgaagtcgcgctcttcaaccatgcgttgcatgagaacggagccgaccataccgcgccagccgataaaaccaacatttttcataagcgtttttttcctgcaaagatgtgtgctgtataaatgtgccggtctcctcttggcacatctttcaccatacaaaaagcagccaaagtcgcaagtgaaattaatcaatgatagcgaagccatcagtaatgcgacttatcctgctttgttagcacgcagaaagtccgcggcaattatcagggaatttgagttatgaatgaaatcatttctgcagcagttttattgatcctgattatggatccgctcggaaacctacctattttcatgtccgtactgaaacatactgaaccgaaaagacggcgggcaatcatggtgcgagagttgcttattgctctcctggtgatgctggtgttcctgtttgcgggtgagaaaattctggcatttcttagcctacgagcagaaaccgtctccatttctggcggcatcattctgtttctgatcgccattaaaatgattttccccagcgctagtggaaatagcagcgggcttccggcaggtgaagagccatttatcgtgccgttggcaattccgttagtcgccgggccgactattctcgccacgctgatgttgttgtctcatcagtacccgaatcagatggggcatctggtgattgctctgctgctggcctggggcggcacctttgtcatcctgctacagtctagcctatttttacgtctgctgggcgagaaaggggtgaacgcacttgaacgcctgatgggattgattctggtgatgatggcaacccagatgttcctcgacggcattcgaatgtggatgaaggggtaacgaggagagtttttcgaaaagaacccggtagcgtcacaactaccgggcgaacaaacttaactcaacagctggaacgcaatcatcccaacgatggcaccgacagtgccgaggatggtttccatcatggtccaggttttcagcgtttcggcttcggtcgcgccggtaaatttaccgaacaaccagaaaccggcgtcgttaacgtggctgacaacaatgctaccaccagcgatacaaatgctcagcgccgccatttgcgcaccggagtagttcagttgttcaataaccggcatcaccagtcctaccgccgttaaacaggctacggtggcagaaccctgaatgatgcgcactgcagctgccagcacgaagcaggtgatagcaatcggcaggcccatgccggttaacgcttcgcccagtgccggacctacgccagagtcaaccagcacctgtttgaacacgccgcccgcaccaatcaccagcagaatgatccccgccggttgcagcgcgtgaccgcaaatctccatcactttgtcttttggcatgccctgacgcattgccagaccgtaaatcgccaccagacaagcaaccagaatcgcggtaaacggatgaccgataaactcaaaccattcgtaagcagtacttccttccggcacaaaacgcgcggcaatggttttcagccctaccagcaccagcggcagcaggatcaggctcaggctgaatccgaaagatggcattttgccttcgccgagatgcggttcgctgatgtcgtcaggaatatgcagctcaacgtaacggctgatgaagttaccccacagcggcccggcaataatcattcccggaattgccgcacacaggccaatcaggatcatccagccaaagtcggcattcatctggcttgccagcagcatcggcgctggtccaggcaccagaaatgccgccgctgccgccacgcctgcaaataatgggattaccagcttcaccaggttcgtaccggtgtggcgcgccatactgaaagcaacgctaatcagcagaactatcgccacttcaaagaacagcggtagcgcacagaccagccccgcaaggccgatggcataatgcgcgcggctgtgaccgaaggatttgagcattttgacggcaatctgatcgactgcgccggtttcatgtaagatcttgccaaacatagctcccagggcgacaaccaccgccaggaagccgagggtgcctcccatccctttttccatcgtcgctgcgattttatcgagcggcataccagaaaaaaggccagcccccatggacaccaccattaaagccaggaaagcgtgcatacgcgccttcatgactaaaaacagcagcagtaaaacagaccctactgctgttaaaacaagcgttaatgtagtcactacttatttgccttttttaataacctcaatggtgcttgccacaacaccttccagcggttgatcgatatccaccaccagtacatcggtttcgtccgcacccggctcctgcagcgtttcaaactgcgtcaccaacatttgggttttaaagaaatggcctttgcgcgctttcaggcggatttcaatcacatcaaaatcgcctttcaaatagatgaaagagagattcggattaccttcacgcagcaagtcgcgatagtgttttttcaatgcagaacagacgatcaggctcactttattagtgcgctgcatagcaaacgcggcgtcgttcagcgcctgcaaccacggtttgcgatcgtcgtcattcagtggttcgccagacgccattttttcgatattgcgccgtggatggaggaaatcgccatcaagaaacgcggcatgaagttgatgcgccacttcactggcgaccgcagatttgccgctgccgcttacgcccatcaagacgtaaatgtggtgatcatggttagtcgtgctcaaagtggtgcccccacaatacaagaattaaaaatgttacgggtaactgttatcggtaacattgtccagccggacaatatcagaagcaatatccatccatgccttaagtgtataagtgtgagctacttcaaatttgtgggcttaaatagatccgcccggactcaaggtgaaacctaaatctaacattttcggtgtcacagattcgccacgaatacgcgccagcaggcgttcagcgccaatactgcccatccgctcacgcggcgtcagcacgctcgcaagtcgtggctccatcacctgaccaatgtcatgaccgtggaaaccggcaatcgccatatcgtcaggaacttttaaccccagacgctgacattcaaacgccgcgccgaccgccaggtcatcattcgtacagaacacgccatccagctgcggatattcccgccgcgcctggcgaatcagttcaataccggaagagtaagaagaagattgctcaaccatcacgctatatggcaccaggcctgcatccagcatcgcctgttcgtatcccttctgtttgatgatagtacgttcgtcgagacgtgcgccgagataggcaatgtggcgatgcccgcgagcaataatggcagtggtcatctggcgtgctgcttcaaagttatcaaaaccgacggcgatatcaaggcatgggctcttgctgtccatcagttccaccacgggaatacccgccacttcaatcatctttaaggtgcgcggcgtgtgggtacgttcggtgaggatcaggccgtcgatattccaggagagcatggattcgaggcgttcttgctccatttccggtttataaccgtagtgcgccagcatggtctgataaccgtgcgcgtcggtgacgctttcgattccgcgtaatacttccgcgaaaacctggttggtgagagaaggtaacaggacgccaatcgcccggctggtggcgttagagaggatatcgggcgcacgattgggaatatagcccagttcatcaagagccgcggcaatcttgccgcgtagagcgacggaaacctgctccgggttgcgtaaaaaacggctgaccgtcattttggtcacgcctacacggtcagccacatcctgaagtacgggtcttttctttttcatcgtcctgaaggtacaaaagagatagattctcttagtttaacacggacacatcagaaccttcccggggaaaacagtgcttgtttacaattattagatatacactaaatcaattgcatcgcattgtgctaacgacgcggcaaaaccccggaagcgtacatcagcacgcgaccggagcgagcgaggaagcctgcaaaaaggcaggcttcaaagatgccgttgagttttaaaccggcggcagatcgaacagtaacacttcgctgtcgctatccgcatggatggagattgcctgctcatcccagattgccagaccatcgctggtgctggctttcacgccgttaatggtgacattgcctttcaccacctggatccagacgcggcgttcagcggcaatctgatgcacgctctgctcatctttcagcaacgcccagcggtacagttccatatcctgatgcactttcaaactaccatctcgcgcatccgggctgagcaccagctgtttgccctgtacggcatcgaagcgacgctgttcataacgcggcgtaataccgttttcttcaggcatgatccagatctgatacagatgcagacgctcggtgctgcttgggttgtactcactgtgacgaatacccgtaccagcactcataatctggaactcacccgccggaacctgctctttattgcccatgctgtcctgatgctcaacagtaccttccagcacgtaggtcaaaatttccatatctttatgcgggtgagtgccgaagccctgccctgcttcaatcacgtcgtcgttaatcacgcgcagcgcggagaagcccataaagttcggatcgtaatagttggcaaaagagaaagtatgccaggagtccagccagccatgatttgcatgaccacgttcatttgctttgcgtaagtagatcatttgtattcgccccctgaatgatttcgatgggcttagtgtggacccgatctgcctgggatgatagagggtgaaaattgacccctctgttcaaaaaaattgaactattcgaggggccatcaaacttacttagcgagagttactgtggagggagaggcttgctcaaatccgcgttcaaggatttccagattggtaagaacttcagattccttgacgtaatttggcgcaccgtgggtgatggtttgatacaacgcatcataaacgcgcccgtaatcgcccatctccggcttcatctcttctctgaccgtcacgccctcgtcattgacatactccagcacaccgacgctatcatccgctgcgaatcccggttcgcccggcataatattagccttcaggctggtttcctgctggtcgataccgtatttaataaagctacctttcttaccgtgaacgataaatttcggataatcgattttcaccagatggctggttttgacgatggctttcaggtcgccataaaacagttgcgcttcaaaggtgtcgtcaggattggctttattacgcaggctgcggatgtcataagcgacgtgatccgggcgaccgaacagagaaataatctggtccatcgtatgcacaccaaggccataaaacgcgccatcctgcggcagcccaggtttggtttctgccaccgggcggtaatagtcaaaatggctttccacttcaacaatctctcccaacttgccactttcaatcgcttttttcgctgtcaggaagcaggagtcaaagcgacgattctgatacggcgtgacggtcagccctttgcttttcgccaacgcaaacagctctttcgcctgcgcaagtgtcggagtgaacggtttttcgaccagcacatttttcccggcttccagcgcgcgtttcgcgtactcgaaatggctgtccgcgtgggtgcagacaacaaccagcttaacatcgggatcgtttagtacttcgtcgagatcgctggtgaaatggatatgggaataaatgggagcctgttcttccggcttcgcatggcgacgaaaaatatgcgcgacatgccagctatccttgcggttaagtacatacggcagatggtaacgggtggtgcttttgccgaagccaataaaggcgcagttgatgaccatgatttcgtcctttttaaggtggttatttacaccttagcgcaaagcggacgtggttcctactggagtgcgcataacgaacacaagcactcccgtggataaattgagaacgaaagatcaaaaaaaaagccagcacccggctggctaagtaatactggaagcaatgtgagcaatgtcgtgctttcaggttctccgcgagggtcttcctgatcgcgagacaataataatcattctcattcgcacttgtccaacactttttgcaaaaaaatgcatttgactcgcatttgaaagtcaatgatgttgaaagggacatttaccccaaagaggacaaaggaacaaatgctcttcccacgaagagggccgctaaccttagtaccccgccgttaaatcatccacgctgcgcgggtcggatgcgccgtacaactcaccgtccggcccaaccataatgctttgtgtactgcccatcgcctctttcagcgccactttctgaccttttgcttccagcagcttgagcgtatccgggctaaaccctttttcgacacgcagctcgtccggcaaccactgatggtggaaacgcggcgcattggtcgcttcggcgacgttcaagccataatcgatgctattcaccaccatttgcagcactgtagtgatgatccggctaccgcctgggctaccggtaaccagccaggttttaccgtctttcaccacaatggtcgggctcatgctgctcagcgggcgtttgttcggcccgacggcgttggcatcaccgcccaccagcccgtaaacgttcggtacgcccggtttggcggagaaatcatccatctggttattaagcagaataccgctctcgcccgcgacaatgcccgtaccgaaggtggtgttcagcgtataggtcaccgccaccgcgttaccatctttatccaccacactgtaatgggtagtttgattactctcataaggcgcaagcttgccggggcgaatttcgctggatggcttcgctttattgatatcaatttgatcggcaatagatttggcataggctttattggtcagcgcctgccacggtactttgacaaaatccgggtcgccaagatattcgctgcggtcggcgtaggcgtatttctccgcttctgccatgatttgcatcgcatcggcgctgccaaagccgtatttcttcatatcgaagttttccagaatattgaggatttgtacgatatggatcccgccggaggatggcggtggcatggagtaaacctgatacccgcgataatcgccgcttatcggagtgcgttcgaccgctttataggctgctaaatcttctttagtgatcaagccaccgtttttctgcatctcctgggcgatctgttccgcaatcgtgcctttatagaattcgtccgggccgttttcagcaatcatctccaggctctttgccaggttcgcctgcaccagcgtgtcgccctttttcagcggctcgccctctttccagaagatagctttactgttttcgtgattcggcaacacttcgctaccgtaggttttgagatcgtcagccagcgcgtcgttaacgataaaaccatcgcgtgccagtttaaacgcgggctgcacgactttgttcagcggcatggtgccgtatttatccagcgccaggctgaaacctgctaccgtacccggtgtgccggaagccagatggctagtgagactttttttgctgtccgggttgccctgatcatcgaggaacatatcgcgggtcgctttggcgggtgccatttcgcggaaatcgatagccgtggtattgccatttttgctgcggattaacataaaaccaccaccgcccagattccctgcctgcggatgcgttaccgccagcgcgtagcccaccgccacggcggcatcaacggcattcccgccctccttgagaatatccacccccacctgagtggcagtggcgtccacagacgctaccattccctgtttcgcgcgtaccgggtggaagacatcttcctccacaccatagctgacgggcggcgcaggaggcgcggcggcggcgctaaaacaacttccactgagcagagcagcaatggccacccggcgtaaaaacgtcggttttatcatcgttattctccagagattaaggggcaaccccagctaagcctggtatataactctgaattaatcatcgttttgtcgggaagcgagtaaacttaaaggatatcttcagaggaggatacgcgatgaaacgacttctgattcttacggcactcctgccgtttgtcggctttgcacagcccattaatactctgaacaaccctaaccagccggggtatcagatacccagccagcagcggatgcaaacccagatgcagactcagcaaatccagcaaaaagggatgctgaatcagcaactgaaaacgcaaactcagttgcaacagcagcatttagaaaaccagataaacaataattctcagcgggtgttgcagagtcagccgggggagcgaaatcccgcccggcagcaaatgctgcccaacaccaacggcgggatgttaaacagcaaccgtaatccggatagtagcttgaatcagcagcatatgctgccggagaggagaaacggcgacatgctgaatcagcccagcacgccgcagcctgacattccgttgaaaactattgggccgtaattattgggccgtaaagttcggaccaatcacgtcaatcgcatcggtacagatgcaatccacaccccagcgcagcaactctgctgcgcgctggggtttattgacggtataaaccagaatccgcagtccggcgtctttcaactgcatcactcgcgctttattgagtaacttatgattgagatgaatagagacgcagcccagccgcgcggtcagttcgcgccagtcgtcgcgccactcatccagcaacaaaccgcgcggcagttccggtgccgcctgttgtgcagcttctaaagcatcaatctcaaagctactcagcagcggcggcgtcataccggcccacagctcgcgtgccgccagcgccaccattttgcccgttaatggcccggtgccggtggtgggtttgatttcgatattcgccatcatcccgtgttcgcggcaacgttccgccacctggctaagcaacggtagcggctcacctttaaacattttgctgtaccaactgcccgcatccacgcgcagtaaatcctgccagttcagttcacccgcgacgccccagccgttgctggtacgttcgagattgtcgtcatggagcaggaagatctcgccatctttgcttaacttcgcgtcaaattcgatcatcttatgaccgtattttgccccgacgtcgatactcgccagggtgttttccggggccagcttaccgccgccacgatgagcgacgatgcggggataaggccagttactcatactcgttgtcctgtttcaccatcaaaaagatgcagctgattttccgccagatgcagccacagcgtgctgcctgccgtcgggcgctcctgatgcgccagtcgcaccaccagcttctgctcgccccagcgtccgtgcgccaggttatctgcgccgaggatctccagcgtgtccatcaccatcggtacgccgccttctgcctggctgcttagcgcaatatgttccgggcgaatgccgagagtcattttacgcccggcatactgacggtagccaccgtttagcggcagctcaataccgccgtccagttcgaaatgcgtgccttcgttattcacgcggcctgtcagcaggttcatcgccggactgccgataaaactcgctacaaacaggctggcgggcttttcgtagacttcaactggtgtgccaatctgttcggcaacaccgccgttcatcaccattactcgctgggcgagcgtcatcgcttcaacctgatcgtgagtaacgtagagactagtcgttttcaggcgacggtgcaactgttgcagttcaagacgcatctgcacgcgcagcttggcatcgaggttagagagcggctcatcaaacaggaacaccgccggatcgcgcacaatcgcgcggcccatcgccacacgctggcgctgaccgccggaaagctcgcgcgggcgacgtttgagcagaccgtccagctccagaatgcgcgccgcttctttaacgcgctcggcaatttgctgcttgcccatgccgcgaattttcagcccccacgccatgttttcttcgacactcatatgcggataaagcgcgtagttctggaacaccatcgcaatcccgcgatcttttggctccatttcagtcacgcgctggtcgttgatccagatatcgccttctgtcacccgctccagcccggcaaccatgcgcagcagcgtgcttttcccgcagccagacggcccgaccatcacgataaattcgccatccgccacatcaagggtcagcggtttaatgacctgggttttaccatcccagcttttggttactgcctgtaatttcagtcctgccatcttatttctcactatcgaccaggccgcgcacgaaggcacgctgcatcactaaaacaatcaccaccggagggataagcgttaacaacatcgccaccatcacactgttccattccgtggtgccttcgcctgtagcgatcatccctttgatccctgccacggtggtgccgagatccacatcggtaataatcaacaacggccacaaatactgattccagccgtagataaaggtgatcacaaacagcgccgccagattagttttggagagcggaaaaacgatgtcgcaaaagaagcgcattgggcttgcgccgtcgatccgcgcggcttccaccagctcatccggcagcgtcataaagaactggcggaacaggaaagtagcggtcgcgctggccatcagcggcagcgttaaaccggcgtagctgtcgagcatctgcaggttggcgatgacttccaccgtcgggaagatacgtacttcaaccggcagcatcagggtgataaaaatcatccagaagaagaggttacgtagcggaaaacgaaaccagacaatggcaaatgcgctgagcatgctgacggtaattttgccgagcgtaatgctgaacgccatcacaaagctgttaagcaacatccgccagaacggcgcgctattcgtgcctaccccgttcacccagatgttgtggatgttttccagcagatgtgtgccggggatgagcgtcatcggcgcggcatagacggcctgtttatccagcgtcgccgcgacaaacgccacgtacagcgggaagaggatcaccgcgatcccgaggatcagcatggtatggctgaatatcgtcagccacggacggttctcaatcattggtaacgcaccttgctttcaacatagcggaactgcaccaccgtcagcacgatgacgaggaacatcaacaccacgctctgtgcggcagagctagccagatccagtccggtaaaaccttcgcggtagatcttataaatcagcgtcgtggtggcctgaaccggcccgccggacgtggcggcgtcgatcaccgggaaggtgtcgaagaaggcatacaccaggttcactaccagcaggaagaaactcaccggggcgataagcggcagcgcaatcttaaagaagcggcgaatcggccctgcaccgtcgatggctgcggcttcgatcaagctacggggaatggattgcagcgcggcatagaagaacaggaagttgtagctgatttgcttccatacactggcaaacaccaccagaaacattgcctgaccgctgttttgcgcgtggttccagtcgtagccgaactccgcgagaaaatgggtgatcagcccgcgaccggggttaaacaggaagatccacaatacggcggcaacggcgggagccacggcgtaaggcagcaacattaaggtttgatagaaacggctgccgcgcacgatgtactccaccagcgccgcaaagaacaggcttaccagcaaaccgctgacggtgacaaaggtgctgaattttatcgtcgtccagaaggagtcgagatagtagctgtcatggaacagcgtgacgaagttatccaggccgacaaactggctggagaaaccaaacggatcgacgctttgtaggctgtaccacaacgcttcgcccgcaggccagataaaaaagataacggtgatgatgagctgcggcgcgaccagcagataaggcagccagcggctgcggaacaccggacgggaactactcattacggttaattcctgaactgtgccggatgcgcttcgcttatccggcctacacgcgatgccaggtcagataagcgaaacgcatccgacattacactgattaagacttcgtgcttttctcaaagcggcgcagcaactgatttccacgctcaacggcggtatccagtgcctgctgtggtgtcttcttaccggtccacacgctctccagctcttcatccacaatcacgcggatctgcggcatgttgcccagacgcagccctttggtgaacggcaacggcggcttattcagcatctgacgcgtcgcggtatccgcccctgggtttttctcataaaagccctgctcacgggtcaggtcatacgctgctttggtgattggcagataaccggttttctgatgccactcggcagcgttttctggcttcgcgaggaaatcgaggaacttcgccacaccggtatacgtttctttatctttaccctgcatcacccacaggctggctccgccgataatggcgttttgtggcgcatctttcgcatcggcgtcgtaaggcatcatgcctacgccgtagttaaatttggcgtactcgcgaatgttggcaagagaaccggaagaggcggtggtcatcgcgcaatcaccgttatagaacttctcggtggattcatccttacgaccgacgtagctgaagtcgcccttcttgttcatctcctcgagcatggcgatgtgtttcacctgctccggcttattgaactccagcaccgcgtccgtgccgtcaaagccgttgtttttgctggcaaacggcagaccgttccaggcgctaaagttttccagttggatccagccctgccagccgctggcgtagccgcacttcatgccggaggctttcagtttcgcggcatagtccgccagatcctgccaggttttcggcggctgttccgggtctaatcctgctttcttgaaggcgtctttgttgtaatagagaacgggggtgctgctgttgaatggctgggagagtaagtggcccgttttgctgtcggagtagtaaccactaaccgtcggcacaaactggctctcatcgaactgaatccctgcctctttaaacacgtcatacaccggtttaatggctttgctcgccatcatggtggcggtgccaacttcataaacctgcaaaatagccggcgcgttgccggtacgaaatgcggcaatccccgcgcttaaattctgttcgtagttgcctttataggtcggtacaattttgtaatccgggttttcggcgttaaaacgttgggccagagaatccacctctttacccagttccccttccatagaatgccagaacggaatggtcgtcactgcctgtgcattccccattaacgccagtccgagcgccagtgcactagctgtataatgtaacggtttcatcgtttatctctcttgttgtaccgaatgcgcgaattcacgcgttttatgctcgcggggtaacatgacatgctcgaattacagaaaaataacttttttgttacatttgtaagatagtaaggtgtcagaaagatgacaaggcggtgacggcgtgggtgagggaaaatgggagatggggcacggataagcgggaaaatatagaaggtctgaatcaaactctacagattgctcatcgtttcatgccggatgcggcgtaaacgccttatcaggcctacaagatcgtgcaaattcaacatattgccactcacccagtaggcctgataagcgcagcgcatcaggcaattttacatttgtcacctgtctcaaaggagtcttttgactccctatcaatcaacgtgttattacccgcctaaatacgcacttctcaccgcttcattcgccagcagcgcatcaccagtatcggaaagcactacatggccgttttccagcacgtagccgcgatccgccagctttagcgcctggttggcgttctgctcgacgagaaagatagtcatcccctgctcgcgcagctgctcgatggtgtcgaaaatttgctggatgataatcggcgcaagaccgaggcttggctcatcaagcagtagcaaacgcgggttgctcatcagcgcacgaccaatcgccagcatctgctgttcaccgccggacatggtgcccgcccgctgaatacggcgctcatgcagacgtggaaacagctcatacacccactttatgcgctcctggaactggtcgcgttcagcaaaaaaaccgcccatcgccaggttctcttccaccgtcatccggctgaagacgcgacgcccttccgggacaatcgccaccgcttcgcgcatgattttcgctgtctgccagtcggtaatgtctttatcatcaaacacaattcgcccgctggtggcacgcggatcgccgcataacgtgccgagcaaggtggttttccccgccccgttcgcgccaatcagcgtgacaatctcgccctgattgatatgcaggctcacctcatgcagcgcctggattttgccgtagtgggcgctgactttgtcaaaggacaacatgactttttccatcttatgcctcacctaaataggcacggatcacgtccgggttattacggatctgctccggcgtaccgtttgccagcggcgtcccctgattgaccacgtaaattcggtcgctaattcccatcaccagcttcatatcgtgttcaatcaacaagatagtggtgttgtgatgattgcgcagttcggcaatcagctcatccagctctttcgtctctttcgggttaagacctgccgcaggttcgtcgagcattaaaatctccggctgcgtcaccatgcagcgggcaatctcaagacggcgctggtcaccataggccaggttactcgcctgacggttggcgtgttccagcaaaccaatgcgctcaagccaggtcgcggcgcggtcgagcgcttcgctctgggcgcgacggaaggatggcgttttcaacaggccagagaacagcccggttttcagttgctgatgctgcgccaccagcaggttttcaattaccgtcatttcacggaacagacgcacatgctggaaggtgcgcaccacgcccatgcgggcaatttgctgccccggtaaaccttccaggtgctgatcgcgcagtaaaatggtgccgccggtgggtttgtagaatccggtcagacagttaaaaaccgtggtttttccggcaccgttagggccgattaagctgacgatctcctgcgggtacagttcaagattgacgttgttcaccgccagcaggccgccgaagcgcatcatcaggccgttaacagataataatggctgactcatgcctgctctcctttcgctgcgccgtttttcagcttcagttgcgggcgcgtcatgggcagcaagccctgcggacgccagatcatcatcagcaccatcaaaccaccgagcattaacatgctgtattcgttgaaatcacgcatcaactcgcggctcaccaccagcaaaattgccgccagaatcaccgcaaattggctgcccataccgccgagcaccactatcgccagcacaaacgcgctttcggcaaaggtgaaggattccgggctgacaaagccctgacgcgccgcaaacagcgttccggcaaaaccggcaaacgcggcacttatggtaaaggcagtcagcttgatacgacgcgggcttaagcccaggctacggcaggcgatttcatcttcacgcaacgcttcccacgcacgccccagcggcatccgcagcaggcggttaatgacaaacaggcttagcaccaccagcagcaacgccaccaggtagaggaagatgacacgatcggagggatcgtatttcaggccaaagaaattactgaacgtgtcccagccgccttcacgagcggtacggctgaactcgagtccgaagagtgtcggtttcgggatctgactgattccgttcgggccgccggtaatttcggtgttattgagcagcaatatgcgcacaatttcgccgaaaccgagggtaacgatcgccagatagtcaccgcgcaaacgcagcaccggaaaaccgagcaggaagcccgccgccgctgccattaatccagcaatcggcaggcaggtccagaagcccaagccgtaatagtgattgagcagcgcaaaagtgtaagcgccgatggcgtaaaaaccgccgtaccccagcaccagcagaccagaaagaccaacaaccacgttcagcccgagaccgaggataatgtagatcatggtcagggtggcaatatccaccgtcccgcgactaaccataaacggccacgccaccgcaagcaccaacagcgccacgaggaacagtttctgcttcaccgtggagccatcaatggcgggcagaataaacttcggtccggaaacgcttttcaaccctttctggaaagccggtcgcaaaagctggaagaaaaagaccaccgccgtgccgataaacacccactgccaacggacatcgctagccgtgtcgaccaccagtttggtgccatccagctccagttgcacgcccataaagacgcccgccagcacaaagaacatcgcggcagagagcagcgccattgcaatatgcatcggtttcatactttctctacctccgggcgacccagaataccggtcggcatcaccagcagcaccagaatcagcagggcgaaactgaccacatctttatattccgtactcagataggcagaagagagcgcctccgcaatccccagaatcaggccgccaatcatcgctcccggaatgctgccaatcccaccgagcaccgccgcggtaaaggctttcatcccggccataaagccgatgtaggggttaatgacgccgtagaactgaccgagcagcacacccgccaccgccgccatcgccgcgccaatcacaaaggtcagcgcaatcacccggtcggtgttaatgccaagcagactcgccattttcagatcttccgcgcaggcacgacacgcgcgacccatgcgggaatagcgaatgaaaatcgtcagcgccagcatggcgaggaaggtaacaatccagatcaccgcctgcatggtggtaatagaggcagagaagttttcgctatgccccaccacccactgaccgttaaacaggctcggcagcgccacgtcgcggctaccttcggtcaggctgacgtagttttgcaggaagatggacataccgattgcagagatgagtgcaatcaggcgcttagagttacgcaccgggcggtaagccacccgttcgatactccagccgtaggcgctggcaatgacgattgcgccgacgaatcccgcagctaccagcagccagccggtatcaatgcccatcatcatcagcgcggcgatgatcataaaactgacgtagctgccaatcatataaacctcgccgtgggcgaagttgatcatgccgataatgccgtaaaccatggtgtagccgatggctatcagcgcgtaggtactgcccagcgtgacgccgttaaacatctgctgcaagaaatacaaaaactgctcagacataaggtaacctttctaaacccgcccgcattttacgggcggtgggatgatcacttggctgccgtggaactaccgtcggcgtgccactggaagacaccaaaatcaaatcccttaagatcgcctttttcatcccagttcagcggcccaatcacggtgtttgcaccgttagcttttaaatctttcaccagcgccagcggctcatcgctgccggtacgctcaagggcagtcgccagagattgcaccgccgcgtaggtgatccagacataaggcccggacggatctttcttgtctgctttcagcgcatcaacgatgccctggtttgccggatcctggtcatagcgttttggcatagtgaccaacatgccttcggcggcatcaccggcaatgttgctcaagctcgcattacccacaccttccggccccataaactgggttttcaggccaacggaacgggcctggcgcagcatctgccccatttccgggtagtaaccgccgtagtaaacgaagtcgatgttttcttttttcaggcgggcgatcagcgcggagaaatctttctccccggcggtaataccgtcgaagaagacgacgttggcgttagccgctttcagcccgtcctgcacgctacgcgccagcccttcgccatactgttgtttgtcgtgaatgatggcgatgcgctggggcttcaccgtctcaagaatgtattttgccgccgttggcccctgggaagagtccagcccggcagtacgcataatgtgttgataaccgcgttgggtcagctccgggttggtcgctcccgggctgatcatcagaataccttcgtcttcatagatatcactcgcaggctgggtagaagaagaacacagatgaccaataacgtatttaatgccgtcattaacgattttgttggcgaccgcaacggcttgtttcgggtcgcatgcgtcgtcatattccacgccaaccagtttatcgcccttaattccccctttggcattaatgtctttaattgcctgacgcgcgccgttaaattccatatcgccccactgggcaatcgggccggacatcgcgccgacaacggcgactttaatatcgtcagccatagcggtgtgactaattgccagtgcaatcatccctgcgatgatagttttcgcattccgtttcatagtcaaaaatccccattcgtgatgttgtgttgctttgtttttatgtgttaacaaatcagactgttctttttttatactgcactgtttttgcctgtctgattaaggggttagcgcagtattttgtgataatagcgattaaaatccctatttttcagtcgattaagaacagataatattctgaatttattgatagataaacagaaaaaagtgcctttgtcagcataaaataacggcacaaagggcggaataattcactatcattcaggggattatgctggacatttttcattctctaatgttttaattttgtaattattgctgttaaaaaattaatcacctgccaaaagaaataaaaaagagaaagcctccgattaaattatttcgctacactggttccacttttgtgatttacacgggttacccatgaagctgaccatcattcgattagaaaaatttagcgaccaagaccggattgacctgcaaaagatctggccggagtattccccttccagcttacaggttgacgataaccaccgtatctacgccgcgcgttttaacgagcgcctgctcgctgccgtgcgggtaaccttaagcggcaccgagggagcactggattccctgcgcgtgcgggaagtcacccgccgtcgcggtgtggggcaatatctgctggaagaggttttgcgtaacaatcctggcgttagttgctggtggatggcggatgcaggcgtggaagatcgcggtgtgatgacggcgtttatgcaggcgctggggtttacggcacaacagggcggctgggagaagtgttaatcgtcaagtttgatttcaaaagtgatattgcctgatgcgctacgcttatcaggcctacaatgtgtgttgcaatttactgatttctttggatcttgtaggccggataaggcgtttacgccgcatccggcatgaagcaacgtactcgatattagcaatttggcggcaacccaaagttgccgattaatgattacttcgcatcggtcgccgtgccgttggcgtgccagtcaaatacgccgaactcaaagcctttcagatcgcctttctcatcccaggtcagcggtcccattacggtatccacggagttcgctttcaggtatttggcgatttcagccggatcgtcagactgattcaggcccgcctgcaaagattgcagcgcggcgtaggtggtccaaacgaatgcgccacttgggtcctgttttttcgctttgatcgcgtcaacaatgggtttgttcgccggaacctgatcgtagttcttcggcttggtcaccagcagcccttccgcactttcgcccgcaatgttagacaggctaacgttagccacaccttccggccccataaactgagttttcagccctgccgcgcgtgcctgacgcaggatttgccccatttccgggtgataaccgccgtagtaaacgaagtcgatattctcttttttcagacgcgccaccagcgtactgaaatctttttccccggcggtgatgccatcaaagaacaccacgtttgcattgcctttcttcaggccgtcctgcaccgctcgcgccagaccttcgccgtattgctgtttgtcgtgaacgatagcaatacgctgcggtttcactttctcaagaatatatttcgccgccgtcggcccctggtcggagtccaggccggtggtgcgcaggatcagctgatagccacgggcggtcagctccggcgcggttgccgctggggtgatcattaaaatgccttcgtcttcgtagatgtcagacgcaggctgcgtactactagaacagaggtgaccaatcacatatttaatgccgtcgttaacgactttgttcgccaccgcaaccgcctgtttcgggtcacaggcatcgtcatattttacgatttgcagtttgttgcctttaatgccgcctttagcgttgatatccgcaaccgcctgctctgcgccggtaaactcctggtcaccgtactgcgcaaccggaccggacattgcgcccacgaccgcgactttaatatcttctgccagagccatattgctgaatgccagcgcgatacatcctgccagtaacgctttaccctttatgttcatcctgagaatccccattcttctggttattacgtgtgttgtgatgttgtttttcagcactttatttcgttttatgcatgactacccgtgctttagcagcatactctgctaaaacatacccgatttttatgatattggaatagctattttgacagtttattaacaatctgcgtggggattggcgttttgccggaggggaaattgattattacagaggcccaaaaaacaaaaaccccggactctcatccagggttctctgcttaatagcggaaattacgcttcaatggcagcacgcaattttttcatcgcgttcttttccagctggcgtacacgctcagcggaaacgccgtaacggtcagccagttcctgcaacgtggacttgttgtcttcgtccagccagcgcgcacggatgatgtcctggctgcgttcgtccagaccctgcatcgcgtcggtcagacggtttgccgcctgctcttcccagttatcatcttcaatgccgtcggcaaagttagaacttttatcctgcagatagagcaccggagccatcggctggctgtcggaatcgtcgtcggaagacaggtcaaaggtcatgtcctgtgccgccatacgactttccatctcacgtacgtctttgctggttacgcccagttcacgggccaccatttcgacttcatcctggttaaaccagcccagacgctgcttggttttacgcaggttgaagaacagtttgcgctgcgctttggtggtcgcaactttgacgatacgccagttacgcagaacgtattcgtggatctctgctttgatccagtgaacggcgaaggagaccaggcgcacacccacttccgggttgaaacggcgcactgctttcatcaggccgatgttaccttcctgaatcaaatccgcctgtggcaggccatagcccgcataattacgagcaatatgaacaacaaaccgcaggtgagacaggatcagcgttttagctgcttccagatcgccatggtaatgcagcttttcagccagcgcccgctcctcgtcagcgctcaacatcggccacgcgttagctgcccggatgtaggaatccaggttgccaactggggctaaagctaaactttgcattttgtcagtcattcaaatcctctcaatcgatatcttctggcgcttcagtggtagcaacaactgtgccagagcttaagagcaacgaggttatcattcactgttttatcagaccgtgattttatccacaagttcaatgcaagcttgtgaataaattacgcacaaaatgtgacatagagatgaaataccgggaagagacaacggggtctctttccctgctacggaacccattgcagggaaagagtataacacgcttttattattcaggcgtaaagtggcgtaaatgttgtaccgtggcaagccacgctgccacccagccaatcatgctgcataccagcagcaatagcaggcattcatcgaaacttaagccattgatatcaaacttcgttccgaaaacctgtgccacttccgcaaccgcgctactcaatcgcagcaccagaatttcactcaaaattaaactcaacaatgcgccagaaaatcccagcagtgcgccaccatacaggaacgggcgcaggatgaatccatctgtcgcaccaatcagtttctgtacgttaatggagtcacggcgagcaaagatactcagacgcacactgttaccgatgacgaggaacacggccgccaccatcaacacgccgatcatcgcgctaacgcgcccgaccagcccggtcaacgccgccagacgggcaaaccagctgtcatccatccgcacttcgtcaatgccgttaatctgcgtgatacgatcacgcagcgtattcagactttccgtcccctggaaatcgagtttcgggatcaccaccgccactgccggaagcgggttttcttccagcatatccagcgcaccaccaaaaccagaccagttacggaactcacccagtgcgtcttcacgagaaagatagttcactttctccacgccttgctcggcctgcaactgtgccaccacgcccgcagcagcgtcatcgtccagcgttttttgcagataaacagtgatttgcggactcggataatactgcgtcgccgcctggttaacgtttttgtacaccatataacagacgctgggcagcgtcagagaaatggcgataaccatcaccgttaaaaacgtggcgaacggtttgcttttcagatcctgcaatgcgccgtggaaggcatagcgcacctgttcgttgaaaacgttggttttgcgatttaccggttttgggctggatttcgcgcgttttggtgcgttacgaccgccgtcgccactgccgccgacgcttttacggaagcgatcaagacgcccgccaaactgccgaatatgattgattgcatcgcgcttattcatggcccacgcctccatgcaagtgaccatcgctcagggtgagcatgcgataggaacgccggctgatcaggttgatgtcgtgcgttgccatcaatacggttaccccaacgcggttaaactcttcaaacagacgtaaaatgccttcgctcagcgcgtcgtccaggttaccagtcggttcgtccgccagcagtaccgcgggcttgttcaccaccgcgcgggcaatgccaacacgctgttgttcaccgccgctaagctgaatagggaagttcttcgctttgtccagtagcccgactttatccagcgccgcgctcacccggcgacgaatatcgtcaccgctggcaccggcgataatcagcgggatcgccacgttatcgtagacagtacggtccatcagtagatggtgatcctggaaaatcatgccaatctggcggcgcagaaacggaacttcacggtttttcagacgcgtgatgtcatggccgctaaaccagattttcccggcgctgggccgctcaatcccacagatcagcttcaggagggtacttttccctgcgccggaatgaccggtcagaaacgccatctcacccggctgcatatggaacgtaacgccctgcagcgcctgtctcccaccgagataagccttgctgacatgttcaaagcgaatcattgttaatcctctcgggcaaaaagtgcctctataaagtcgtccgccttaaacggacgcaaatcctcaatacgttcgccgacaccaatgtagcggatagggataccaaactggtcagccacgctgaaaattaccccgcctttcgccgtgccgtccagtttcgttagcgtgatgccggttaagccaacggcttcatggaacagtttggcctggcttaccgcgttctgcccggtgctggcatcaatagtcagcataacttcatgcggcgcttcaacgtcgagtttcttcatcacgcggacgattttcttcaactcttccatcaggtggcttttgttctgcaggcgtccggctgtatcggcaatcaggacgtcgatattacgcgctttagctgcctgaatggcgtcgaagataacagaggcggaatccgccccggtatgctgggcaatcaccggaatattgttgcgctgaccccagacctgaagctgttcaaccgcagctgcacggaaagtatcacccgccgccagcatcacgcttttaccctgctgctcaaactgacgcgccagcttaccaatcgtcgtggttttacccacaccgttgacgcccaccatcaggatcacaaacggcgctttgccttcaacattcagcggctcatcgactttcgccagaatctcgcccatctcttctttcagcaggccatagagcgcctcggcgtcacgaagctgcttgcgggatgcgccttccgtcagattggtgataattttacgtgtggtttccacacccacatcggcgatcaaaagctgctcttccagctcctcaaacagatcatcgtcgatttttttaccgcggaacaggctgataaatccggaaccgagattttctttggtttttaacaggctgcgtttcaggcgcgcgaaaaaaccttctttggtcggtttttcctgctcctgagcgatttcttccaccggctgctcttcttctgccggaggaaccaccatcaccgcctcttctgccgcttcggcagccagcgccgtttccagctcttcgtcggtaatttcttctttagccgcttcttcttccgccgcttcgacaatctctacggtttccgcttcagcctgccactcttctgggctaaccgcttcggcgttgacgtcttccggcaacggcagctcttcacgttcgatagccactggctccggcgtttcttctacgaccggttccggctgtgcaacgacttccgcttcaggctgcgctttttcactttcagcaacctgttcagtgacttccacaacgtcggcagcaaaagtttccgcctcggcttcagtatgcgcttgcggctgctcttcaacggcttgttcagaggccttcacaggctcttgcgcctgaacgatttcttctacaaccggttgttcattctgaacttctgtctctttttccggggtctgctctttttgaccaaagcccagccaggaaaaaaagccacgttttttttctttcgccatttgcgactacactcctcgctgttgcttcatggcacagcgttaacgctatgtacatagcagctaaaaaaatgatgaaatagtctatcacttaacttaattcacatcaccgcctgcaagtatgtgttatctggcggattgagcaatttatcatgaaaaaaccgaatcattccggcagcggccaaatccgcattattggcgggcagtggcgaggccgtaaactcccggttcctgatagcccaggtctgcgccccaccaccgaccgcgtacgcgaaacgttgtttaactggctggctccggtcattgttgacgcccaatgtctggattgcttcgccgggagcggcgcgctggggctggaagcgttaagccgctacgctgcgggggcaacgttgattgagatggatcgcgcggtttctcagcagttaattaagaatctggcgacactaaaagcaggcaatgcacgcgtggtgaacagcaacgcgatgagtttcctggcgcaaaaaggtacaccgcataatatcgtgtttgtcgatccaccgttccgccgtggcttgttagaagagacgataaatttactggaagataacggctggctggctgacgaagccctgatttatgtcgaaagcgaagtcgaaaacggtctgcccactgttccagcaaactggagtttacatcgggaaaaagtggcgggtcaggtggcttatcggctgtatcaacgcgaagcacaaggagaaagtgatgctgattaatattggtcgtttgttaatgctctgcgtttggggatttttaatcctcaacctggtgcatcccttcccacgcccgctgaatatcttcgttaacgtggcgctgatttttaccgtgctgatgcatggtatgcagctggcgctattgaaatccactttaccgaaagatggcccgcagatgaccaccgccgaaaaggtacggattttccttttcggcgtgtttgaactgctggcctggcagaagaaatttaaagttaaaaaataaccttattgttcgcctacaaagctgacaaagcgcgttcctttatagctcagcgtacctttatcgcccactgtcagggcgtggtactgctgggcgtcgaggcgaaacgtctgctccattcctccgctttgcggtttgaagcttgcctcatagcgtatactggtgcctgccggagtcacttcctgctggcggctacggcgatcgttaatcggtttttcccgcttgttgctcaccaccaccagcttttgctggagcggagccatatcattatcagctttttcccgtcgctgttgcataaaacgaaagcttgcggcgacgacaattaagccaatgataacaataaagaaaagaggtggtttgctcatctttatccctcatcggaaaatgcggaaataagcataccctgccagttatggtgttgtcatccgtccaccctcgccactaaactggaagcaagaccgtaggcattccgcttacgaaaaaataacgaattcaaggaactaagatgctttggagctttatcgctgtctgtctttccgcatggctatctgtggatgcaagctatcgtgggccaacctggcaacgctgggtgtttaaaccgttaacccttcttctcctgctgttactggcctggcaagcgccgatgttcgacgccattagctatctggtgctggcagggctgtgcgccagtctgctgggcgatgcgctaaccctgttgccacgtcaacgtctgatgtacgccatcggcgcgtttttcctcagccacctgctgtacaccatctatttcgccagtcagatgacgctctctttcttctggcctctaccactggtgctgctggttctgggtgcgctgttactggcgattatctggacgcgcctggaagagtaccgttggcctatctgcacgtttatcggcatgacgctggtgatggtgtggctggcaggtgaactgtggttcttccgtccgaccgctccggcgctctctgcgtttgttggcgctagcttgctgtttatcagtaactttgtctggctggggagccactatcgccgacgcttccgtgcggataacgcgattgctgcggcctgctactttgccggtcacttcctgatcgtccgcagcctgtatctctgataaaacttgactctggagtcgactccagagtgtatccttcggttaatgagaaaaaacttaaccggaggatgccatgagcactcctgacaatcacggcaagaaagcccctcaatttgctgcgttcaaaccgctaaccacggtacagaacgccaacgactgttgctgcgacggcgcatgttccagcacgccaactctctctgaaaacgtctccggcacccgctatagctggaaagtcagcggcatggactgcgccgcctgtgcgcgcaaggtagaaaatgccgtgcgccagcttgcaggcgtgaatcaggtgcaggtgttgttcgccaccgaaaaactggtggtcgatgccgacaatgacattcgtgcacaagttgaatctgcgctgcaaaaagcaggctattccctgcgcgatgaacaggccgccgaagaaccgcaagcaagtcgcctgaaagagaatctgccgctgattacgctaatcgtgatgatggcaatcagctggggtctggagcagttcaatcatccgttcgggcaactggcgtttatcgcgaccacgctggttgggctgtacccgattgctcgtcaggcattacggttgatcaaatccggcagctacttcgccattgaaaccttaatgagcgtagccgctattggtgcactgtttattggcgcaacggctgaagctgcgatggtgttgctgctgtttttgattggtgaacgactggaaggctgggccgccagccgcgcgcgtcagggcgttagcgcgttaatggcgctgaaaccagaaaccgccacgcgcctgcgtaagggtgagcgggaagaggtggcgattaacagcctgcgccctggcgatgtgattgaagtcgccgcaggtgggcgtttgcctgccgacggtaaactgctcagtccgtttgccagttttgatgaaagcgccctgaccggcgaatccattccggtggagcgcgcaacgggcgataaagtccctgctggtgccaccagcgtagaccgtctggtgacgttggaagtgctgagtgaaccgggagccagcgccattgaccggattctgaaactgatcgaagaagccgaagagcgtcgcgctcccattgagcggtttatcgaccgtttcagccgtatctatacgcccgcgattatggccgtcgctctgctggtgacgctggtgccaccgctgctgtttgccgccagctggcaggagtggatttataaagggctgacgctgctgctgattggctgcccgtgtgcgttagttatcagtacgcctgcggcgattacctccgggctggcggcggcagcgcgtcgtggggcgttgattaaaggcggagcggcgctggaacagctgggtcgtgttactcaggtggcgtttgataaaaccggtacgctgaccgtcggtaaaccgcgcgttaccgcgattcatccggcaacgggtattagtgaatctgaactgctgacactggcggcggcggtcgagcaaggcgcgacgcatccactggcgcaagccatcgtacgcgaagcacaggttgctgaactcgccattcccaccgccgaaagtcagcgggcgctggtcgggtctggcattgaagcgcaggttaacggtgagcgcgtattgatttgcgctgccgggaaacatcccgctgatgcatttactggtttaattaacgaactggaaagcgccgggcaaacggtagtgctggtagtacgtaacgatgacgtgcttggtgtcattgcgttacaggataccctgcgcgccgatgctgcaactgccatcagtgaactgaacgcgctgggcgtcaaaggggtgatcctcaccggcgataatccacgcgcagcggcggcaattgccggggagctggggctggagtttaaagcgggcctgttgccggaagataaagtcaaagcggtgaccgagctgaatcaacatgcgccgctggcgatggtcggtgacggtattaacgacgcgccagcgatgaaagctgccgccatcgggattgcaatgggtagcggcacagacgtggcgctggaaaccgccgacgcagcattaacccataaccacctgcgcggcctggtgcaaatgattgaactggcacgcgccactcacgccaatatccgccagaacatcactattgcgctggggctgaaagggatcttcctcgtcaccacgctgttagggatgaccgggttgtggctggcagtgctggcagatacgggggcgacggtgctggtgacagcgaatgcgttaagattgttgcgcaggagataaggcaaaccgatcgcaacattgagcgcgatcggtcccctcgcccctctggggagagggttagggtgaggggaaaaggcggcatcgaagccaatcagcccctatcaaccgcctttacgaatcaaataacgataaggcagtccatccgtctctttagcaaccagttcgtgttccataaaggtacaaaacccaggaatatcgcgggtagtggccggatcgtcggcgataatcagcaacgtttcgccaggctgcatattgcgcacggttttgcgcaccatcatcaccggttccgggcagcgcaggccaagcgcgtcgagtgtgtggtcagggctggaaaagagatcggtcattttcttctcatcacttaaaaaaacggcgctagtttacgccctgtgagtccgtaagcaaactaggttaacgattgcgtgaaaattaaccattgcattgtcaacgtaaagcagtatcatgcggcggctcgaaaaaagggtaagcacgttattatgttaaggtaacagacgtgtcgtacgtattgggttccctcaccccaatggttaatcaaaaaggtacaatatgaacgttttcagccaaactcaacgctataaggcgttgttctggttaagcttatttcatctgctggtgatcacctccagtaactatctggttcagcttcccgtctccattttgggtttccataccacctggggcgcgtttagctttccgtttatttttcttgctaccgacctgaccgtgcgtatttttggcgcaccgctggcccgacgcattatcttcgcggtaatgatccctgcgttattaatctcctacgtcatcagcagcctattctatatgggttcctggcagggattcggcgcactcgcccacttcaacctgtttgtcgcccgtatcgccaccgccagtttcatggcctacgcgctggggcaaatcctcgacgtgcacgtttttaaccgcctgcgtcagagtcgccgctggtggctggcaccgacagcgtccacactgttcggtaacgtcagcgacacgctggcctttttcttcattgccttctggcgtagcccggatgcctttatggctgaacactggatggaaatcgcgctggtcgattactgtttcaaagtgttaatcagtatcgttttcttcctgccaatgtatggcgtattactcaatatgctgttgaaaagactggcagataaatccgaaatcaacgctttgcaggcgagttaaaggttcgttatcagagttgtgataagatggatgaatgagccgttatggccgtttatcgaaaggaagaagtcaatgcgcaatctggttaaatatgtcggaattggcctgctggttatggggcttgcggcctgtgatgataaagacactaacgctacggcgcagggtagcgtcgcggaaagtaacgctaccgggaatcccgtcaacctgcttgatggcaagttaagtttcagcctgccagcggatatgaccgaccagagcggtaagctgggaacgcaggccaataacatgcatgtctggtccgacgccaccgggcagaaagcagtcatcgtcatcatgggcgatgatccgaaagaagatctggcggtgctggcgaagcgtctggaagatcagcaacgtagccgcgatccgcagctgcaagtggtaaccaataaagccattgagctgaaaggtcacaaaatgcagcagttagacagtattatctccgcgaaaggccagacggcgtactcttccgttattctgggtaacgtgggtaatcaactgctgaccatgcaaattacgctgcccgctgacgatcagcaaaaagcgcagaccaccgcagaaaacatcattaatacgctggttattcagtaagttttaagaactactggcggcctcagggacgtgttccggaggccgtttttttaatcgccacgtcagtaataacgcgattgcgaccagtcccgccgccgccagataaatcaccggtacgcccgcccagctcatcaccagcccagccagtggtccagtcacgccaaggcttaaatccataaatacggtgtaagttgccagcgccgccccctgattttgctgcggaaccgcttttaccgccactacacccaatgccgggaacaccaggctaaacccggcccccgccagtaagacgccgattttcgccatccacggcatagtcgccacgccaaccagtagcaggccgattatctcaacgctaaagcaaatcatcgctacgtttaagccaccgatacggttaatgccgttagggaataacaaacgcgtaccgacaaacgcacagctaaacagcgtcagcgcgaaagccgcaccgtcccaacctttagcgtcataaaacagcgtgataaaggtggcgatgacgccaaatccggcggaagccagtgccagcgccataccgtacagccagacgcgcccaagcaccgcgcgaaacggcagcggtttgcctttactggcttttaccgtcggacgcgggatcgccaacaaaatggccaccagcgccacgcccataatgattaacgctaacgcctgcaagccgccccagtgataaaacacgacgcctaacggcgcacccatcgccatcgccccgtaagtgacaatgccgttccagctaatcacccgcccgatatgcaggctgccaaccacgccaacgccccatagggtgcttcccgttccggcaaaactttgcccaatcccaaggatgacgcgccccaggcaaagtaataacaggctgatgacaggcagactggcggttaatcctgccgtcagataccccagaccgctcaaaaagcagccgcataaaccgaagacgacaatctttttgggtcccaggctatcggcgtaacgtccggcatgagggcggctcagcaaggtggcgaaatattgcaggctgataaccaatcctgcccagaaggcgctaaagcccatcacatcatggacatagcccggtaatacagcgagcggcaacccgatggtgaggtagctggcgaagttaaacatgactatagagacaatgcgcaaattcaggcgcaatccgtttagcgcgggttcggctacgggttcgggcatgaggatcaccacatttttacaacagtgtttcatttttaccacgtgctgacgtgaaaatcagcagtaagaatcagaatattgctggcgtgactcccgctacacttaatacaaaaagtcacaaggaagccccaatggaaacccctcaacccgataaaacgggcatgcacattctgctcaagctggccagcctggtagtgatcctcgcgggcattcacgcagcggcagatatcattgtgcagctgttactggcgctgttttttgccatcgtcctcaacccgctcgtcacctggtttattcgtcggggagtacaacgccccgttgccattacgattgtagtggtggtgatgctgatcgcactaaccgcgctggtcggcgtactggcggcaagctttaacgaatttatctctatgctgccgaagtttaataaggagctgacgcgcaaactttttaaattgcaggagatgttgccttttcttaatttgcatatgagcccggagcgaatgctgcagcggatggacagcgaaaaagtggttaccttcaccacagcgctaatgaccgggctttccggggcaatggcgagcgtgcttttgctggtgatgaccgtagtttttatgctgtttgaagtgcgccacgtcccttacaaaatgcgttttgcgctgaataatccacagattcacatcgcgggattacaccgcgcacttaaaggcgttagccactatcttgcattgaagacgctactcagtttatggacaggtgtcatcgtctggctggggctggagctgatgggggtgcagtttgcgctgatgtgggcagtactggcgtttttgctcaactacgtgcccaatatcggcgcggtaatttccgccgtaccgccaatgattcaggtgctgctgtttaatggtgtttacgaatgtattctggtcggcgcattgtttttagtggtccatatggtcatcggcaatattttagaaccacggatgatgggccatcgcctggggatgtccaccatggtggtatttcttagtttgttaatttggggatggctgctcggcccggtagggatgctacttagcgtgccattaaccagcgtgtgtaaaatctggatggaaaccaccaaaggcggtagcaaactggcgattttactggggccgggcagaccgaaaagtcggttaccgggatgaggcgacaagtgatacgatacgcactttcattttccattaaacgttggccctgatatgtatcggatagttctggggaaagttagcaccttaagcgcagctccactgccaccgggtttacgcgagcaagcaccgcaaggtccacgacgcgaacgctggctggcggggcgtgcattgcttagccacacgctttccccgctaccggagatcatctatggcgaacaaggcaaacctgcatttgcgccggaaatgccgctatggttcaacttaagccatagcggtgacgatatcgccctgctgttgagtgatgaaggcgaagtcggctgcgatatcgaagtgattcgcccgcgcgccaactggcgctggctggcgaacgccgtattcagcctcggggaacacgctgagatggacgccgtgcatcctgatcagcaactggaaatgttctggcgcatctggacgcgcaaagaagccatcgttaaacagcgtggcggcagcgcctggcaaatcgtcagcgtagacagcacctatcactccagcctgagtgtcagccattgtcagcttgaaaatttaagccttgcgatctgcacccctactccctttacgctcaccgccgacagtgtgcaatggatcgatagtgttaactgatccgcccacccgactgcccatctattgatccagaacaggtaatcagtatgacgaatacttaaaatcgtcatacttatttccgccatctattttaatccattggggttaccatgctctccacactccgccgcactctatttgcgctgctggcttgtgcgtcttttatcgtccatgccgctgcaccagatgaaatcaccaccgcctggccggtgaatgtcgggccactaaacccgcacctttacacgcctaaccagatgttcgcccagagcatggtttatgaaccattggtgaaatatcaggcagacggtagcgtgatcccgtggctggcaaaaagctggactcatagtgaagatggtaaaacctggaccttcaccctgcgtgatgacgtgaaattctccaacggtgaaccgttcgatgccgaggcggcggcagaaaacttccgcgcagtgctcgataaccgtcaacgtcacgcctggctggagctggcaaaccagattgttgatgttaaagcactcagtaaaacagagctgcaaattaccctgaaaagcgcctactatcctttcctgcaagaactggccctgccccgtcctttccgttttatcgctcccagccagtttaaaaaccatgaaaccatgaacggaattaaagcgccgattggcaccggaccgtggattttgcaggaaagcaaactgaatcagtacgatgtcttcgtccgtaacgaaaactactggggcgaaaagccagcgattaaaaagatcacctttaacgtcatcccggacccgactacccgcgcggtggcgtttgaaactggcgatatcgacctgctgtacggaaacgaagggttattaccgctcgataccttcgcccgctttagccagaatccggcttaccacacccaactgagtcagccgatcgaaaccgtgatgctggcgctcaataccgccaaagcccccaccaacgagctggcagtacgtgaagctcttaattacgcggtaaacaaaaaaagcctgattgataacgcgttgtatggcacccagcaggtcgccgacaccctgtttgccccttctgtgccctacgccaacctcggcctgaaaccgagccagtacgatccgcaaaaagcgaaagcgttgctggaaaaagccggttggacgctgcctgcgggcaaagacatccgcgagaaaaatggtcagccgctgcgcattgaacttagcttcatcggcaccgatgcgttaagcaaaagcatggcggaaatcattcaggctgatatgcgccagattggcgcagatgtcagcctgattggcgaagaagagagcagtatctatgctcgtcagcgcgacggtcgttttggcatgattttccaccgcacctggggcgcgccatatgatccacacgccttcctcagtagtatgcgcgtaccgagtcacgctgacttccaggcacagcaaggattagccgacaaaccgctgattgataaagagatcggcgaagtgctggcgacccatgacgaaacgcaacgtcaggcgctgtatcgcgacattctgacccgtctgcatgacgaggcggtttatctgcctatcagttacatcagtatgatggtggtaagtaaaccggagctgggtaacatcccctacgcgccgatcgccaccgaaattccgttcgaacagattaaaccggtgaaaccttaatgttgcgttacgtattacgccgctttctgctgctgatcccgatggtgctcgccgccagcgtgatcatttttctgatgctgcgcctcggtaccggcgacccggcgctcgattatttgcgtctgtctaacctgccgccgacgccggagatgctggcctctacccgcaccatgctgggactggatcagccgctgtacgtccagtacggcacctggttgtggaaggcgctgcatcttgactttggtatcagtttcgccagccaacgcccggtactggacgatatgctgaacttcctgcccgccacgctggaacttgcaggtgcggcgctggtattaattctgctcacttccgtaccgctcggtatctgggcggcgcgccatcgcgaccgtctgccggatttcgccgtacgtttcatcgcgtttcttggcgtgagcatgcctaacttctggctggcgtttttactggtgatggcgtttagcgtgtatctgcaatggctacccgcgatgggttacggcggctggcagcacatcattttgcctgcggtttccattgcctttatgagcctggcgattaacgcgcgtttactgcgcgccagtatgctggacgtcgccggtcagcgtcacgtcacctgggcgcgtctgcgcggcctgaacgacaaacagaccgaacgtcgccacatcctgcgcaatgccagcctgccgatgatcaccgccgtggggatgcatatcggcgaactgattggcgggacgatgattatcgaaaacatctttgcctggccgggcgtcgggcgctatgcggtgagcgcgatttttaaccgtgactatccggtgatccagtgctttacgctgatgatggtggtggtttttgtggtctgtaatttgattgtcgatttgctcaacgccgcgctggacccgcgcattcgtcgtcatgaaggagcgcacgcgtgaactttttcctctcttcccgctggagcgtacgcctggcgctgatcattatcgccctgctggcgctgattgcgctcaccagccagtggtggctgccgtatgacccacaggcgattgatttgccgagccgcctgcttagcccggatgcgcagcactggctgggcaccgatcacttaggtcgcgatattttcagccggctgatggcagcgacccgcgtgagcctcggtagcgtaatggcctgcctgctgctggtgctgacattagggctggttattggcggcagcgccgggttgattggcgggcgcgttgatcaggccaccatgcgcgtcgccgatatgtttatgaccttcccgaccagcattctgagcttctttatggttggcgtgctcggcaccgggctgaccaacgtaattatcgccatcgccctgagccactgggcgtggtatgcacgcatggtgcgcagcctggtgattagtctacgccaacgcgagtttgtgctggcgagtcggctttccggtgcgggccatgtgcgggtgtttgtcgatcatctggcaggcgcggtgatccctagcctgctggtgctggcaacgctggatatcggccatatgatgctgcacgtcgcggggatgtctttccttggcctcggtgtgaccgcgccgaccgccgaatggggcgtgatgattaacgacgcgcgccagtatatctggacccagccgctgcaaatgttctggccggggctggcgctgtttatcagcgtgatggcctttaacctggtgggtgacgcactgcgcgatcatctggaccctcatctggtgacggagcacgcacactaatgccgcaacagattgaactacgtaatatcgcgctacaggccgcgcagccgctggtacacggtgtaagcttaaccctgcaacgcgggcgcgtgctggcgttagtcggcggtagcggcagcgggaaaagtttaacctgcgccgcaacgctgggcattttgcccgctggcgttcgccagacggcgggggaaattttagccgatggcaaaccggttagcccttgcgccctgcgcggcatcaaaattgccaccatcatgcagaacccgcgcagcgcctttaatccactgcacaccatgcacacccacgcgcgggaaacctgcctggcgttagggaaacccgccgatgacgctacgcttaccgctgccatagaagcggtggggctggaaaacgccgcgcgcgtgctgaagctgtacccgttcgagatgagcggcggcatgttgcagcgcatgatgattgcgatggcggtgctgtgtgaaagtccgtttatcatcgccgatgaaccgaccaccgaccttgacgtggtagcacaggcgcgcatcctcgatctgctggaaagcattatgcaaaaacaagcgccgggaatgctgctggtgacccatgatatgggcgttgtggcgcgtctggcggatgacgtggcggtgatgtctgacggtaagattgtcgaacagggcgatgtagaaacgctgtttaacgcccccaaacatacagtgacgcgcagcctggtttccgctcatctcgccctctacggtatggagctggcaagttgacctaatacggtatggagctggcatcatgactttacttaacatctccggcctttcccatcactatgcgcacggtggatttaacggaaaacatcaacatcaggcggtgctgaataacgtttccctgaccctgaaaagcggcgaaaccgtcgccctgctggggcgcagcggctgcgggaaaagtaccctcgcgcggttgctggtgggtttagaaagccccgcgcaggggaatattagctggcgtggcgaaccgctggcgaaactcaatcgcgcccagcgtaaagcgttccgccgcgatattcagatggtatttcaggactccatcagcgccgtgaatccgcgcaaaaccgtgcgcgagatcctgcgtgaaccgatgcgccacctgctaagtctgaaaaaatccgaacaactggcgcgcgccagcgaaatgctgaaggcggtcgatctcgatgacagcgttctcgacaaacgcccaccgcagttaagcggcggccagctccagcgcgtctgcctggctcgcgcgctggcggtcgaaccgaaactactgattctggatgaagccgtttctaaccttgatctcgtgttacaggcgggtgtcattcgcctgctgaaaaagctacaacaacagtttggcaccgcctgcctgttcatcacccacgacttacgcctggtagaacgcttttgccagcgggtaatggttatggacaacggacaaatcgtcgaaacccaggtggtgggagagaaattaaccttttcctctgacgccggacgtgtgctacaaaacgcggtattacccgcattccccgtgcgccgtcgcaccacagaaaaggtttaacgcaaatgcaacgagtcaccatcacgcttgatgacgatttactggagacgctggacagcctgagccagcgtcgtggttataacaaccgttccgaagctatccgcgacattctgcgtagcgccctggcgcaagaggccacccagcagcacggcacgcaaggtttcgcggtgctgagctatgtgtatgaacacgaaaaacgcgacttagccagccgcattgtctccacccagcatcatcaccacgacctctccgtcgccacgctgcatgtgcacatcaaccacgacgactgtctggaaatcgccgtgttgaaaggtgacatgggtgacgtgcagcattttgccgatgacgttatcgcccagcgcggcgtgcggcacgggcatttgcagtgcttgccgaaggaagattgagttacgccattgtcccaatcgtcttcctgaatcgcagcagcgcaatggtgaaaaatgcgccgccaattgccatcagcgtcagaaactgcggccagacgatttcgaatccggcaccccggtagaggatggcctgcgcgaggctaacaaagtgtgtcgtcggcatggtcagcataatgtcctgcaccatctgcggcatactttcgcgcggcgtggaaccaccggaaagcatttgcagcggcagcagcaccagaatcaccagcagccccagttgcggcatactacgcgctatcgtccccataaaaatgccgatactcgtggtggcaaacagactgagcgccacgcccagcataaacagcgggatgctgccttcaatcggtacgcccagtacacctttcaccatcagcaccaggcttaatccgcttaccaccagcaccaccagccccatgctccagatcttcgccatcatgatctcaaacggcgttatcggcatcaccagtaagtgttccaccgtgccgtgttcacgctcgcggatcagcgcgcttccggtcaatacaatcgccagcatggtaatgttgttgatgatcgccatcaccccgccaaaccacgcgggatcgaggttcgggttaaagcgcatccgggtttccaggcttaccaacggttcgctgttatcacggtagcgcgcgacaaagctgttcacttcaccgttgataatattctggatatacccattgccggtaaatgcctggctcatgcgcgtggcatcgacgttcacctgaatatccggctggcgtccggcgaggacatcacgctgaaaattaggcggaatatttatcgcgaaggtatagcgtccggcgtccagtccggcatccatctcatcggcggtgatcatctccggtggcaaaaaccacggacgatagaagctgttaacgatccggttgcttaactggctttgatccatatcggcaatggcgatcggcgcgaggttcaagcttcctggcgtaacggtcgcactgctatacacgctcaccgtaaagctgaagacaatcagcgtcagcatcgctttatcaccgagcagactgcgcaactctttgatacccagattaaaaatattgcgtaaatggcgcatcatccctcctgttttttcagcagcaggatacttaagcccatcaccagcgggatggctatcagtaacgggataaaaagttgccacaaatcagtcagatccagcgctttgctgaacgtcccgcgggcgatagtcagaaaatgactggtcgggtaaacctcgccgatccaacgtccaggcccttccaggctagctaccggatcgatcatcccggaaaactgtgtcgccgggatcaacgtgataatcgccgttccgaaaatggcggcaatctggcttttcataaaggtggagatcagcagccccattccggtggcaatgatgatatacagcagcgccgccagggtgagcgtcaggaaactgcctttatgcggtacgccaaacacaaacacgctcaggccgcagagcaggaaaaagttcagcatccccagcgcgatgtatggcaactgtttaccaagcaaaaattcactacgcgtggtgggggtcacgtaaaggttgataatgctcccaagctctttttcccgcaccacgctaagggcgcttagcatactcgggatcatcatcagcagaagcgggatcaccgccggaacaatcgctggcaggctttttacgtccgggttatagcgatagcgcgtctcaatattcatcagcccgctttggctggcgggtgtgctttgtcggctcgccacatcctgtaaccagctctggtgcatggcctgcacgtaaccttttaccgtttcagcacggctcggcatcgctccgtcgatccagacgccgagttccacaggcgtaccacgcgcgatatcgcgcccgaaattgggcgggatctcaatcgccaccgtgatatcgcccgcacgcatccgacgatcaagctcgtcataactggtgagcggcggctgttcgataaagtaacgggaaccggagaggttgagtgtccacgcctggctactgacggtctggtcgcggtcgagcaccgcaaagcgcaggttttccacatccatactgatgccgtaacccattatcagcatcaggatcaccgttcccatcagcgccagcgtgctacgtactggatcgcgtcgcagttccagcgcttcgcggcggctgtagctaaacagacggcgcaggctaaatccctgacgcggcgcgtgggtggtgtcgtgtaccacgggcggcgcttcggcttcgttgctctgccctgccgcttcctgcaaataggcgataaatgcctcttccagactggcggctccgcgtttctcaaccagttcctgcggtgtaccgctggcaagcacttttccggcgtgcatcagactgatgcggtcgcaacgttccgcttcgttcataaagtgggtggagatgaagatagtcactttgtcctggcggctgagatcgaccatcaactgccagaacatatccctcgccaccggatcgacaccagaagtaggctcatcgaggattaacatctccgggcgatgaatcaccgccaccgccaggctaagccgctggcgaatgccgagcggcaaactctccggcagaatatcttcaacgtcgttgagcttaaaacgctcgctcatttcagccactcttgcgggaatttccgcttccgggatgtgaaacaaacgggcatgtaactcaaggttttgccgcacggtgagttcgttatagaggctaaacgcctggctcatatagcccacccgacggcgggtatcgatatcttttggatcaaccggttgcccgaacagccacgcctcaccttcgctggcgggcagcagtccggtgagcattttcatggtggtggatttaccgcagccgttgctaccaagaaaaccaaaaatctccccgcgtggaatgcggaaattaacgtgatcaacggcaacgaaggaaccaaaacgcatggtcagatcgcgcgcttcgatggcaatctctgcgttttcaggttgatacggtgggatcactaccgcctgatgcgcctggcgttgcgcttgcggtaacagatttataaatgcttcttccagcgtagcgctttgcgtttgctgccgtagctcttcggcgctgccagttgccagcacttctccggcattcatcgctaccagccagtcgaagcgttcggcctcttccatataggcggtggcgaccagcacgctcatattgctctgccgctggcgaatactgtcgatcagatcccagaactgggagcgggagagcgggtcaacccccgttgttggctcatcaaggatcaacagttccgggtcgtggattaacgcgcagcacagcccaagtttttgcttcatcccgccggagagtttccctgccggacgatcgcgaaacggtgctaacccggtgctggtcagcagctcattgattcgcacttcccgctccgctttgtcgtgaccgaacaggcgagcgaaaaaatcgacgttttcatacacgctcaaggtgtggtagaggtttttgcccagcccctgcggcatccaggcgatgcgcgggcagacgtcgcggcgatgcttcgggtcgcgcatatcgccgcccagcaccatcacattgccctgttcaatgacgcgggcaccggaaatcaagctcaacaagctgctcttcccgacgccgtccgggccaatcagcccgaccatacagcgggccggaatatcgagagtgatattgttcagcgcaacggtttttccataatgctggctcacgcccgccagttgcgcgacaggcgggacgggaaccagttccagatgcgtcattgcggcaacctcaccacgaggtcgtcaggccacggaagttcttcattcacccgcacccacgctacgcccggcaaaccggttttgacatattccagatgctgctggagtaattccggtgggatacgcgctttgacgcggaacatcagtttcagccgttcatcgctggtttcgacggtttttggcgtgaactgggcgacactggcgacaaaactgatggttgcaggaatacgcagatctggcgcggcatcgaggatcagccgggcttcaccgcccagtttcagcgtgcccgcctgttcggttggcaggaagaaagtcatatagacgtcgctgagatcgaccatattcagcacccgaccgcctgccgccagcacttcgcctggctcggcaacccgatactgcacgcgtccgtcacgcggggctttcagttcgctgtcatcgatatctgcggcaatgcgccgttcagtggcttgtgccgcttcgacgcgggtttgcgcctgaatgatattggtgcgtgccgcttctatagccgctttagaagcgcttacctgagctttcgcgctttccagcgcagctcgggcgctctcagcggcggcgcgatcgtcatccagctgttgcgcagaaatagcccctcgttgggccagactacgggaacgcgtatgacgttttgctacggagtccagttctgcctggcgttgattaaccaggctctgtgcggcacgagtttcgctttgtcgttgctccagcaaagcctgcgcggcagcaacggcgctttgtgcctctttgatttgcgcgatggcttccagtcgctgttcctgcaacacgcgagtatccatcttcgccagcacttcaccttcgcgaacaaacttgccttctttcaccagaatggtgtcgatacgcccggcaattttgctggcaatatccacttccgtcgcttcaatgcgcccattactgacagcaaagccttccggcacacctgccgggcgcaacagccaccacgccacgatagccgccaccgccagtaacccgacaacccaccacgccagatggcgcttactcttatccataatcgacccgccataatccctgtaagcaaacgacgcgtgttacaactgccgccgaacgacgttcagcggattcttccatccgggataagaaggaaacggcaaatacgaccagcgcgcagagcattgagcgccaacggggaaggcttagtgaaaacgggtagtaatgttgtcatcatcagcattcctggccgtaaatgaaacacgcatactcataagtgtgatctataaaactggctgacaaaacggtatccatcctgttggatagcgtttcacgcctgttcagttgcaggaacagagcattcctttttacgttttatcaacagtctcaaccagatagtaacattaatattcatgttgtctatggttcagagctgtaacattgtgcgccttctaatcaaaggcataagtccatttctgtttttttcatgctggtaagacttccagggagtggttatctcaggccctgcaccagggttaatttggcaattatgcatgctgaacattcttccagcatgtttactgtcacgggcgttaagacctaaaactgtccccgtttcgcctatgcgttctcttccaccatttccgttatgtgcaacaacttgatttatacctaacatttgactacatgctaatagtgcttcaagtttaggtctgtaatctgtgctaacagaaaaataacgattaaaggatcgacaagagatagcccggctagttttaaactttttgccattaattatagcatgatgctttttattgataattgccgctaattcgaccggatcgagagcattggtcatttcatcaatagagactgttatcggtcctataatgtaacgttttcgctgatcatcaaaagttatcccatgatgatttgccattattttgtatttggggtcatagaaacatacaggataatcttttatcccagagtaggtatcctcatcgagtggtttcatacgcgtgaagttctgcatatagttaccattgcaattcgtttcatgatttccagctaatacatgaacattttcattgatactcattatgcgttttaacaaatcgatgataaattgatcaccacagatattgctaaatcgatcgccggtttggtcgcccagaaacgtacatggcgtcacagcgtctttattaataactaaataaggctgaagactttctaaaataatgtctcttctgttcaggatactgattattgtattaacattagtgttaagttgctcattaaagttctcccttagcaatacgttgagaacttcatcttctatattaagcaactggctaaggaaattttctccttcagccatgattcccaaatgtcccgttgcgaaaagcgcgaacaaaactgcaccgacactgccatcggtatcaccaaaataggttggtctggtacttgtgggatcaacgggtaaacaattggagaaatagattctgtcagcgaactggggttttatcattgtttcgaatttaatatcagatacattatattggcttattttccagttccagatgggtttgtagctctcagtaactgcaacatcattagcattatcatttactgtcatattattaagtaaataaacaatactgcaccaattaatatcggtattatcaagagagcaaccgtaatttttgctattaattgtcacaataaactgataattattattcctacgtagaatatgagcacgcatgccgcttagcatactatatttttcactatgatccgtttgtatggtaaaactaattttgtcatcttgaatagattgttggaaccgttctatttgccaatcatctattttttccacaacctcaccgagcattgtcctggcaatactacttatatcatcacctataccatttgcaatatacccaaacagttctttagtgaagttggtaacatgctcttgcaccatatcatttgttgcgattgtcgttgtactgtcgttagtgcctgccacagttccaattttcatattttacctcatattatttaccgcgaggaatacatagttaacattttatcttatgacatacacctcatgttcgatgggaaaataattatattttgcacaaatcattcagcctcaaagcataatatgaaatttcttatctcatagcagagaaagtccctaaagattgtagaggcgtcatcagaacatgcctctacaatcgattaagaaaacctatgaaatactggcaggattaaaaagacataccaccgtattcatggagttttaatgtagttgaaaacaactaagcccactggaataaattattttattatttttatcacgtgcttccttcagggaatttagccccataataccattatcaaattgttgattatgatctaccccgggcccatgatgcccatatttttgtctaatgtatttgctggggtcttcacctttgagtgtctccccacatatgaagatacgttcacgtgctggtctgaaatcagtagtgttatcaaaataattagcatatacaggtgtgggtttcaaagtattgcttcggattagatggaatagaggatcatccatgtgttctttatgttttttattaaaaatattggctaattcctcaggatcagtaggatttttcatctgattaaatggaacctgcaaagcacgctgacaataacatttttttcttcatctcttattattccgtgatgactggttaaaacttgcctttcactgtcataattacaaacatcgagcgttttaattaagttatacgtatcaccggcagagagtttatgatttgctagtcgtgcagtatagttaccattaaaattgatttcatgatttccagccagaacgacgacatttttattaatacggctatctttattaccctccatatttcgcatagaatttagcaaagtaaggatatatttatcaccaaaaatagtactaaatctatcgcctgtatgatccccaaggaagatacaaggggttatcgcatcgtcctttaaaaaaacatgttgatgcaactcattcaagatcatgtctctcgtatttaataaatcgtagagcactttattatttttatgtttgtatgcagaactagccatctcttcgtgttttaataattcacataataaactccaacccttttccctgatgcctatatgcccactaacgagcaatgcataaagtacagcgcctactcttccatctgtatcgccaaaataagccgtgttggcattttgtgggttaatcacaccacactgtttatagaagtctattttactaaacacagatttaacatagctatcaaacttttccttagtaaacgtctctttagagacatcccaacgccagtcaggtttgaaattaccactaagaagagtaaagaaatttctcgctatgatagaaagcccatcaactttataaattatatcacttttatctccagaggaattaataaaataataaccgcccttacactcaacagtaacggtaatgggagagcttaattttaacacatggttattgtctggtataattgtaaagataaacgtatcagtagtattgtcggcgaatctattatattcttgaatatctatagaaggttcactattataaaaccatactttctccatctggtgactacgatcatttaccttccagtgaccatgttgcaggaaatagatgatatgcaggccaaaatcgttatctatttggctatcattatccagtttatcaaattcaactatctttgcacgatgtgttttatcaaccttgccatggtgttgatgactgttaactttatcactatgcttatcttgatggctactagagatgtttctaatctgattgtcaattgctttcataaataacctgtgatatttttgaattgtttgtaacaaaataaatgatacttgtctgaaaaacagatttacgacgatataaaataataatacttatatgttcgctgattttaagcaccgagactatccggtcttttaccaaataatgaagaataatccctccctggaagataattgtaaaaaacaacagcataagaattaatcttaggataaatttttatttatcatggccttttgaacgctgaaaagtagcgctctgcaaagtaaaccccgctatagttatgctatgcatttgtctttaatgatatctcgtcattatattaacaggatgaaattatcattaatgcatatttcaatattagcagggatacctgaggagtttaaagtgaacatatatatcgggtggcttttcaaattaatccctttgattatgggcttaatttgtatcgcgttaggtggctttgtgctggaaagtagtgggcaaagcgagtatttcgtcgcgggtcatgtgctgatttctctggcggccatatgcctggcattattcactaccgcatttattatcattagccagctcacgcgcggcgttaatacgttttacaatacattgttccccattattggctatgcggggagtattatcaccatgatatggggttgggcactgttagcaggcaatgatgtgatggcagacgagtttgtcgccggccatgttattttcggcgttggtatgattgccgcctgtgtaagcacggtggcagcgagttccggtcactttctgctcattcccaaaaatgcagcggggagcaagagcgacggaacaccggtacaggcttattctagtttaatcggtaactgcctcattgccgttcccgttttactcaccctgctcggtttcatttggtctattacgctgttacgtagtgctgacataactccgcattatgtcgcgggtcacgtattgcttgggttaaccgcaatctgtgcctgtctaattggccttgttgccacaattgtccatcaaacacgtaatacgtttagtactaaagaacactggctgtggtgttattgggttatttttctcggcagtatcacggtactgcaggggatatacgtcttagtcagttccgatgcaagcgcccgactggctcccggcattattcttatttgcctcggaatgatctgttacagcatattcagtaaagtctggctactggcactggtatggagacgtacctgtagcttagccaacagaataccgatgattcccgtcttcacctgcctgttttgccttttcctggcaagctttcttgcggaaatggcgcagaccgacatgggatattttattcctagccgagttctggtcggtttgggagcggtatgctttacgttgttcagtatcgttagtatattagaagcgggttctgctaaaaaataattgcaacgtaccggataaaaccagcgttgaccatttgcgtaacgctggtttttcttaggcatcatgaaataacgcagcattaatgcatagtggttaagtataaaaaacagcaaagttactgtttttttcaacctgttcatatttcataaagatctggccactgagtgagttttcaatcacctttccatccaccttatattaagcatggagggtttcagttcacgggctcattagaaaataatcacaagataaccactatcaaaattagctcatttttaatgcgactctaataattttcatctttaggaaataggtcaggagctctttgctgcaatcaaatcctgcgcacaagcccacgcactgctccacgcccactggaagttatagccccccagccagccggtgacgtccatcacttcgccgatgaagtacagcccaggcactttgcgcgcttccatcgtccgactagagagttcgttggtgtccacgccgccgagcgtcacttcggcagtgcgatagccttcagtgccgttgggttgtacgcgccagtcggtcaatgtgctaatcagtgcctgttggtcacgcacgttgagctgttttaggctaacatccgggatttgcccgagttgctgtaagcgttcaaccaaccgcttcggtagatgaaccgccagtgtgtttttcaggctttgattcggatgtgcgttacgctgctcattcaggaaggtttcgaggtccacatccggtagcagattgatgctgacaaattcccccggttgccagtagctactaatctgcaacaccgccggtccagacaagccgcggtgggtgaagagtaagttctcacggaaaacggtgccgttttcagcggtaatcacggaaggcaccgccacgcccgccagcacctgtaactcttcgagcaacggtttatgcagagtgaatggcaccagacccgcgcgggtcggcagcacgttgaggccaaattgttcggcaatcttataaccaaacgggctcgcgcccagccccggcatactcagcccaccagtcgcgatgaccagcttttcgcaaccgacagtcatgccgttcagatcaagcgtgaagcctgtttcatccttcgccacactcagcacttcgctacgcaatctgaaggtcacattgcccttctcgcactcatccaccagcatgtcgacaatctgctgcgcggagtcatcgcagaagagttgccctaacgttttctcgtgccaggcgatgccgtgtttattgaccagatcaatgaaatcccactgggtaaaacgtgcgagtgcagacttacaaaaatgcggattctggctcagataagcgcctggttcgacataaaggttggtaaagttgcagcgcccaccgccagacataaggattttgcgccctggttttttaccattatcgatcagcagaacccggcgtcctgcctgacctgccagcgcagaacagaacatacccgccgcaccagcgcctataataatggcatcaaacctttccacgttgcgctcctcttagaaaaaacgggcgtgaattgtaaagattcctcagtggtcgcaccagcatcaatattactaaaaggaagtatttgcctgaattatataagataattattttttgagtgaaatccatacagggggcaaatcaaaaaaagtctatatttcactttgcccgcgccgcgaaagtcactgataatgcgccgcgttcatgtcctcaaaatggcgtaacgtcctatgctacatttgtttgctggcctggatttgcataccgggctgttattattgcttgcactggcttttgtgctgttctacgaagccatcaatggtttccatgacacagccaacgccgtggcaaccgttatctatacccgcgcgatgcgttctcagctcgccgtggttatggcggcggtattcaactttttgggtgttttgctgggtggtctgagtgttgcctatgccattgtgcatatgctgccgacggatctgctgcttaatatgggaagctctcatggccttgccatggtgttctctatgttgctggcggcgattatctggaacctgggtacctggtactttggtttacctgcatccagctctcatacgctgattggcgcgatcatcgggattggtttaaccaatgcgttgatgaccgggacgagtgtggtggatgcactcaatatcccgaaagtattaagtattttcggttctctgatcgtttcccctattgtcggcctggtgtttgctggcggtctgattttcttgctgcgtcgctactggagcggcaccaagaaacgcgcccgtatccacctgaccccagcggagcgtgaaaagaaagacggcaagaaaaagccgccgttctggacgcgtattgcgctgatcctttccgctatcggcgtggcgtttagccacggcgcgaacgatggtcagaaaggcattggtctggttatgttggtattgattggcgtcgcgccagcaggcttcgtggtgaacatgaatgccactggctacgaaatcacccgtacccgtgatgccatcaacaacgtcgaagcttactttgagcagcatcctgcgctgctcaaacaggctaccggtgctgatcagttagtaccggctccggaagctggcgcaacgcaacctgcggagttccactgccatccgagcaataccattaacgcgctcaaccgcctgaaaggtatgttgaccaccgatgtggaaagctacgacaagctgagccttgatcaacgtagccagatgcgccgcattatgctgtgcgtttctgacactatcgacaaagtggtgaagatgcctggcgtgagtgctgacgatcagcgcctgttgaagaaactgaagtccgacatgcttagcaccatcgagtatgcaccggtgtggatcatcatggcggtcgcgctggcgttaggtatcggtacgatgattggctggcgccgtgtggcaacgactatcggtgagaaaatcggtaagaaaggcatgacctacgctcaggggatgtctgcccagatgacggcggcagtgtctatcggcctggcgagttataccgggatgccggtttccactactcacgtactctcctcttctgtcgcggggacgatggtggtagatggtggcggcttacagcgtaaaaccgtgaccagcattctgatggcctgggtgtttacccttccggctgcggtactgctttccggcgggctgtactggctctccttgcagttcctgtaatcgtacgcaccaaaacgagcgggtcagctggcccgcttcagattgtgacatagtgcgctttgttcatgccggatgcggcgtgaacgccttatccggcctacaaaaacatgcaaattcaatagattgcagagattatgtaggcctgataagcgtagcgcatcaggcaattttgcgtttgtaatcagtctcgagcgggtcagtttactggcccgctttttttatgcgttattattgctgaagtgcttaatgccaaatcatcaatgcaatcaggctgaccaccaccagaccacacaatgcgctggtcagaataaactgccgacgcacccgctcacagcggcgaataaattcatcatcgtgatgatcgcgataacgttgggcatagatataccaaacgagacgcacctgtttgttgggttggccatgactggtaaaaaagccccctccatcaacatattgatagagcaatggatcgcagttacgcagtaccactaacaacgcgcgtagactactgaaatagcgcgccatgttaacaatgcaaacgacacataaagcccaaaataatgcgacggtgcttatcatacctcctccccggcgacctgcccgcggagttccaccccggggctaccgctcccgatacgctgccaatcagttaacaccaggtcctggagaaaccgcttttgtggtgaccaacatacgagcggctctatagatagtgtaggagatcaggttgttttttttccagaaggttaaccactatcaatatattcatgtcgaaaatttgtttatctaacgagtaagcaaggcggattgacggatcatccgggtcgctataaggtaaggatggtcttaacactgaatctttacggctgggttagccccgcgcacgtagttcgcaggacgcgggtgacgtaacggcacaagaaacgctagctggccagtcatcgacaactttatggaaggagtaacactatggcttataaacacattctcatcgcggtcgacctctccccggaaagcaaagttctggtagagaaagcagtctctatggctcgcccctacaatgcgaaagtttctctgatccacgtagatgtaaactactctgacctatacaccgggcttattgatgtgaatctgggtgatatgcagaaacgcatctctgaagagacacatcatgcactgaccgagctttccactaatgcaggctacccaatcactgaaaccctgagcggcagcggcgacctgggccaggttctggtcgatgcaatcaagaaatacgatatggatttggtggtttgtggtcaccaccaggacttctggagcaaactgatgtcttccgcacgtcagctgatcaacaccgttcacgttgatatgctgattgttccgctgcgcgacgaagaagaataatcttccctctacgacgtgttcctgaacgcccgcatatgcgggcgttttgctttttggcgcgccttgttacctgatcagcgtaaacaccttatctggcctacggtctgcgtacgcaatcaaaatccccagccaatacaacatttaacaccatcatattttccatcattagtgtgatcatctggttattttctgttgtaatagtgtattaatctattcaccgcatcaatattaagaatctctgacagatgtaaactttttcgcgcgttatcccttacgcgttcatacttttcaggatggtattggaaggttaataaatatgaatacaacaacacccatggggatgctgcagcaacctcgcccatttttcatgatcttttttgtcgagttatgggagcgattcggctactacggcgtgcagggcgtactggcggttttcttcgttaaacagcttggattcagccaagagcaggcttttgtcacttttggtgcttttgctgcgctggtctatggcctcatttccattggcggctatgtcggcgaccacctgctggggaccaaacgcaccattgttcttggagcacttgtgctggcgattggctacttcatgaccggcatgagcctacttaagcctgacctgattttcatcgccctggggactatcgctgtcggtaacggcctgtttaaagctaacccagccagcttgcttagcaagtgctatccgccgaaagatccgcggcttgatggcgcattcaccctgttctatatgagcatcaacatcggcagcttgatagcgttaagcctggcccctgtgatcgctgatagattcggttatagtgtcacctacaacctgtgcggggcggggttaattatcgcattactggtttacatcgcctgtcgtggaatggtgaaagacattggttctgaacccgacttccggccaatgagcttcagcaaactgttgtacgtgttacttggcagcgtggtgatgatcttcgtatgcgcatggctgatgcacaacgtagaagtcgccaatctggtgctgattgttctctccatcgtcgtcaccatcatcttctttcgtcaggcattcaagctggataaaaccgggcgcaataaaatgtttgtcgcctttgtcctgatgctcgaagcggtggtgttttacattctctacgcccagatgccaacaagcctgaacttctttgccatcaacaacgtgcatcatgaaattctcggtttttccatcaacccggtcagcttccaggcgcttaacccgttctgggtggtactcgccagcccaatactggcaggcatttacacgcatctgggtaacaaaggcaaagacctcagcatgccgatgaaatttactctcggcatgtttatgtgcagtctgggctttttgacggcggcagctgcgggaatgtggtttgcggatgcacaagggctgacaagcccatggtttatcgtgctggtgtacttattccagagcttaggtgaactgtttattagcgcccttggcctggcgatgattgctgccctggtgccgcagcatttgatgggctttattctcgggatgtggttcctgacgcaggctgccgcgttcttgctgggcggctatgtggcaacatttaccgcggtgccggacaacattaccgatccgcttgagacgttgcccgtctataccaacgtgtttggtaagattggtctggtcacgctgggcgttgcagtagtgatgctgttgatggtgccgtggctgaaacgcatgattgcgacgccggaaagccattaattattcttgcagaaagcagggtagcgttatcgctaccctgttttagttttacactggcgtacctgcatagatatcaaagcgatgccctttagtgactaccgcgtttggcgtggcgacattcgccagcggtggcgcgtagtccgggcgctttaccaccacgcgtttggtcgccagcaagcgtgcaggctccagtaatccatcggcatcaagatccggtcccaccaggctctgaaagacacgcatctcttttttcactagcgcgcttttctgcttatgcgggaacatcgggtcgagataaaccacctgcgggcgcggggtaatatcagtcagcgccgtcaggctggaggcgtgaattaactgcaaccgctcctgcaaccagccgccgatttccgcatccgcataaccacgcgccaggccgtcgtcgagtagcgcggcaaccactggattacgctccagcatccgcacgcggcagccgacactagccagtacaaaggcatcgcgcccaagtcctgcagtggcatccaccacatccggcaaataatcgcctttaatgcccaccgctttcgccaccgcctcaccgcgaccaccgccgaatttgcgtcggtgcgccatcgctccgccaacaaaatcaacaaagatgccgccaagttttggctcatcacgcttgcgcaattccagatgttccggcgttaacaccagcgccatcaggttgtcttcatcgtgctccagcccccagcgggccgccagaacagataaggcaccgtctccggtgcctgtttcatcaattaagcagattttcactgaatgatcagcccttaatgccgtaatgctccagcatcgcatccagctgcggttcacgaccacggaagcgtttgaacagatccatcggctcttcactaccgccacggctcagaatgttgtcgaggaagctctgcccggtttcacggttgaaaatgccctcttcctcaaagcggctgaaagcatctgccgccagtacgtcagcccacaggtagctgtagtaacctgcggcataaccaccggcgaaaatatggctgaaagcgtgcgggaaacggccccaggacggagatggcaccacggcaaccagtttcttgatttctgccagagtttcgaggatttttgccccctgatccgggcggaactcggcatgaaggcggaaatcaaacaggccgaactccagctgacgcagaataaacagcgccgcctggtagttcttcgccgccagcattttatccagcaactctttcggcagcggttcgccggtttcatagtgaccagagataaacgccagcgcctccggctcccagcaccagttttccataaactgactcggcagttcgaccgcatcccacggcacaccgctgataccggaaacaccagcggtttcgatgcgggtcagcatatggtgcaggccgtgaccgaactcgtggaagagggtgatcacttcgtcgtgagtgaacagcgccggtttaccatttaccgggcggttgaagttacaagtcaaatacgcgaccggtttttgcaaagaaccatcagctttacgcatctggcctacgcagtcatccatccacgccccgccgcgcttgttttcacgggcatacagatcgaggtagaagctaccgcgcagttcgttattttcgtcatacagttcgaagaaacgtacatccggatgccagacatcaacatctttacgctctttagcggtgatgccgtaaatacgcttaaccacttcaaacaggccgttaaccgctttgttttccgggaagtacggacgcagctgttcgtcactgatgctgtagaggtgctgtttttgtttttcgctgtagtaagcgatatcccacggctgcaactcatcgacgccaaattcggctttggcaaaggcacgcaattgcgccagctctttttcgccttgtggacgcgcgcgttttgccagatcggttaagaaatccagcacctgctgcgggttttctgccattttagtggcaagggatttaaaggcgtagttttcaaagcccagcagttgcgccagttcgtgacgcagcgcgaggatctcttccatcaccttgctgttatcccatttaccggcgtttgggccttgatcggaggcgcgggtgctgtaagcgcgatacatctcttcacgcagagcctggttgtcgcagtaggtcattaccggcaagtagcttgggatatccagcgtcagcaaataaccttccagctctttcgcttcggcctgggcttttgccgcagccagcgcgctttctggcatccccgccagctccgcttcgtcggtaacgagtttggtccagcccattgtcgcatcgaggacgttgttgctgtactggttgcccagttcagaaagacgggtcgcaatttcgccgtaacgctgctgtttctctttcggcagacctatgccagagagttcaaagtcgcgcagtgcgttatcaaccgctttcttctgcgccgtgttcagcgtggcgtaatgatcgccatcgcgcaggtcgcgatacgctttatacagcccttcatgttgccctacccaggtgctgtattcgctcagcagcggcagggtttgttcgtaggcttcacgcagttccgggctatttttcacgctgttcaggtggctgaccggggagaagatacgccccaacacatcgtccacttccgccagcggctggcagagattttcccaggtgtacggtgccccttgcgctactacgcgctccacgttttcgcggcagtcgttcaatgccttagtcacggctggaacgacatgttccgggagaattttagaaaacggaggcaattcaaagggagtcagtaacggattcgtcattcgcgcagtcctggttaaagaggttaaggaagcgctcaacaggcgctttacataatgtgtgtagcatggggttaagtgtagtgaatttcaatgagaaacgttacgctttcgcggcggcggcctcttttcggtatactgtcctgatacgcttttgtgcgccccgaatacgggccgatttttacttaccggaacacctttacccatgctcagttatcgccacagctttcacgctggcaaccacgccgacgtccttaaacataccgttcagagcctgatcatcgagagcctgaaagagaaagataaaccgtttctctatctcgacacccacgcaggggccgggcgttatcagttaggcagcgaacatgccgagcgtaccggcgaatatctcgaaggcatcgcccgtatctggcagcaggacgatttgcccgcagaactggaggcgtacatcaatgtggtaaaacacttcaaccgtagcggtcagttgcgttactaccccggtagcccgttgattgctcgcctgctactgcgtgaacaggacagcctgcaactgaccgaactgcacccgagcgattacccgttgttgcgttctgaatttcagaaagatagccgtgcgcgtgtcgaaaaagccgacggtttccagcagcttaaggccaaactgccgccggtttcccgccgtggtttaatccttatcgacccgccgtatgaaatgaaaactgactatcaagcggtggtcagcgggatagcagaaggttacaaacgtttcgccactggtatttacgcactgtggtatccggtggtgctgcgtcagcaaattaagcgcatgatccacgatctggaagcgaccggtattcgcaaaattctgcaaattgaactggcggtactgccagacagcgatcgccgtggcatgaccgcttccggcatgattgtgattaacccgccgtggaaactggaacaacagatgaataacgtgctgccgtggctgcacagcaaactggttccggcaggcaccgggcacgccaccgtaagctggatcgtgccggagtaattgcagccattgctggcacctattacgtctcgcgctacaatcgcggtaatcaacgataaggacactttgtcatgactaaacactatgattacatcgccatcggcggcggcagcggcggtatcgcctccatcaaccgcgcggctatgtacggccagaaatgtgcgctgattgaagccaaagagctgggcggcacctgcgtaaatgttggctgtgtgccgaaaaaagtgatgtggcacgcggcgcaaatccgtgaagcgatccatatgtacggcccggattatggttttgataccactatcaataaattcaactgggaaacgttgatcgccagccgtaccgcctatatcgaccgtattcatacttcctatgaaaacgtgctcggtaaaaataacgttgatgtaatcaaaggctttgcccgcttcgttgatgccaaaacgctggaggtaaacggcgaaaccatcacggccgatcatattctgatcgccacaggcggtcgtccgagccacccggatattccgggcgtggaatacggtattgattctgatggcttcttcgcccttcctgctttgccagagcgcgtggcggttgttggcgcgggttacatcgccgttgagctggcgggcgtgattaacggcctcggcgcgaaaacgcatctgtttgtgcgtaaacatgcgccgctgcgcagcttcgacccgatgatttccgaaacgctggtcgaagtgatgaacgccgaaggcccgcagctgcacaccaacgccatcccgaaagcggtagtgaaaaataccgatggtagcctgacgctggagctggaagatggtcgcagtgaaacggtggattgcctgatttgggcgattggtcgcgagcctgccaatgacaacatcaacctggaagccgctggcgttaaaactaacgaaaaaggctatatcgtcgtcgataaatatcaaaacaccaatattgaaggtatttacgcggtgggcgataacacgggtgcagtggagctgacaccggtggcagttgcagcgggtcgccgtctctctgaacgcctgtttaataacaagccggatgagcatctggattacagcaacattccgaccgtggtcttcagccatccgccgattggtactgttggtttaacggaaccgcaggcgcgcgagcagtatggcgacgatcaggtgaaagtgtataaatcctctttcaccgcgatgtataccgccgtcaccactcaccgccagccgtgccgcatgaagctggtgtgcgttggaagcgaagagaagattgtcggtattcacggcattggctttggtatggacgaaatgttgcagggcttcgcggtggcgctgaagatgggggcaaccaaaaaagacttcgacaataccgtcgccattcacccaacggcggcagaagagttcgtgacaatgcgttaaatgttaaagggctaagagtagtgtgctcttagcccttaattacgtttccgctatcagttcagaagctgaagcagaaagcggatcagttccagcagcgcaattaacgcccctagaacgatgattgctttatcaatcacccgttttctccatgcgatggagtgagaatgcatccgcttactcatccactgcctgtcacggcgcatgtctcattgttagataagaactctctcactccggccagagcatcagttaacggcaccacccgtacttctgaccaggactttgaaagcgtttatgcgcattgccagagtgaaaatgcctcagagctaactggataatcatacagtacatgcaggttataaaaccagcacgtccttgcaatagtttcagtatggtattagcattgatgcgttagatgatggctatctcactccagtcagagccaccaactcagggctggaaagtaaaaaaccgacgcaaagtcggtttttttacatccggattcggacaaggcttaatatgacgatgacccagtgaaagtatataaatcgtcactgcgatatataccgaagtgctccctccgccagctgaagaaatcgctaattcttgcaatgttagccactggctaatagtattgagctgttagataagaactctctcactccagccagagccaccaactcagggctggaaagtaaaaaaccgacgcaaagtcggtttttttacgtcctgattcagacctcctttcaaatgaatagccaactcaaaattcacacctattaccttcctctgcacttacacattcgttaagtcatatatgtttttgacttatccgcttcgaagagagacactacctgcaacaatcaggagcgcaatatgagttttctgttacccatccaattgttcaaaattcttgctgatgaaacccgtctgggcatcgttttactgctcagcgaactgggagagttatgcgtctgcgatctctgcactgctctcgaccagagccagcccaagatctcccgccacctggcattgctgcgtgaaagcgggctattgctggaccgcaagcaaggtaagtgggttcattaccgcttaagtccgcatattccagcatgggcggcgaaaattattgatgaggcctggcgatgtgaacaggaaaaggttcaggcgattgtccgcaacctggctcgacaaaactgttccggggacagtaagaacatttgcagttaaaaatttagctaaacacatatgaattttcagatgtgttttatccgggaggcattatgttactggcaggcgctatctttgtcctgaccatcgtattggttatctggcagccgaaaggtttaggcatcggctggagtgcaacgctcggcgcagtactggcgttagttacgggcgtggtccatccgggtgatattccggtggtgtggaatatcgtctggaacgcgacggctgcgtttatcgccgtcattatcatcagcctgctgctggatgagtccggcttttttgaatgggcggcgctgcacgtcagtcgctggggtaatggtcgtggtcgcttgctgtttacctggattgtcctgctcggtgctgccgttgccgccctgtttgccaatgatggcgcggcgcttattttgacaccgattgtcatcgccatgctgctggctttagggttcagtaaaggcactacgctggcgttcgtgatggcggccggattcattgccgataccgccagcctgccgcttattgtctccaacctggtgaatatcgtttccgctgatttctttggcctcggctttcgcgaatacgccagcgtgatggtgccggtggatatcgccgcgattgttgccacgctggtgatgttacatctctattttcgcaaagatattccgcagaactacgatatggcgctgctgaaatctcccgcagaagcgatcaaagatcctgctacgttcaaaactggctgggttgttttactgcttctgctggtgggatttttcgtcctggaaccgctcggcattccggtgagcgccattgcagctgtgggcgcgctgatattatttgtcgtcgctaaacgcggtcatgcgattaatacgggtaaagtcctgcgcggtgccccctggcagattgtcatcttcagcctcggcatgtatctggtggtttatggcctgcgcaatgccggattaacggaatatctttctggcgtactcaacgtgctggcggataacggcctgtgggccgcgacgctcggcaccggattcctcaccgccttcctctcttctattatgaacaatatgccgacggtactggttggcgcgttgtccattgatggcagcacggcatctggcgttatcaaagaagcgatggtttatgccaatgtgattggctgcgatttgggaccgaaaattaccccaattggtagcctggctacgctactctggctgcacgtacttagccagaagaatatgactatcagctggggatattacttccgtacagggattatcatgaccctgcctgtgctgtttgtgacgctggctgcgctggcgctacgtctctctttcactttgtaatgagatactgatatgagcaacattaccatttatcacaacccggcctgcggcacgagccgtaatacgctggagatgatccgcaacagcggcacagaaccgactattatccattatctggaaactccgccaacgcgcgatgaactggtcaaactcattgccgatatggggatttccgtacgcgcgctgctgcgtaaaaacgtcgaaccgtatgaggagctgggccttgcggaagataaatttactgacgatcggttaatcgactttatgcttcagcacccgattctgattaatcgcccgattgtggtgacgccgctgggaactcgcctgtgccgccctagtgaagtggtgctggaaattctgccagatgcgcaaaaaggcgcattctccaaggaagatggcgagaaagtggttgatgaagcgggtaagcgcctgaaataaagcggcgatatcccccccacaggttgttagaaaagtgcgctttatttatgtcggatgcgacgctggcgcgtcttatccgacctacaaagttatgaaaattcgatgaatagtatgttatttgtaggcctgacaggcgtagcgcatcaggcgattttgctatttacacagtactccctgcgtgagattccaattatcgcgtccagcatggtgtatcagtgagctgcttagttatcagcgatacagcgcagtagtttaaagacgtactggattatgatttatcagtggtttacacaacaaattattaaataattataagataccttaacccattttattattacacatctaaaacatcacaaaaaaaatcacttcacacactatcagagaacataataactttttaaaatgagcgcattttgatagttgttaacgatttcctttacgatactatcactaccctttttttacacacaaatattaccgggtggagataaaagggaaatcaaaggtaattatatcaggaagatataacgcattacatttattgtgtgtagaagaaaatccattcctgttctaattatccaatttaaacatcttagcataaaacaaatgatgaataaggaattttatattgattattagcactttataatcattgaataaaaatagattttatgtacttttaaaacaatgcactatattatggggtgatggatattcatgtcacgccccaaaattaactgagttcacctaaacagaaaggatataaacatcagacaggtttacgttactatcaggcatatcacctcagaatcagatgaaaactataaagaaatatctattatggttttaatatttgttgataaggatagtaacatgaacatgacaaaaggtgcactcatcctcagccttagttttttgcttgccgcatgtagtagtattccgcaaaatatcaaaggcaataaccaacctgatattcaaaaaagttttgttgctgttcataaccagccggggttatatgttggtcaacaagcgcgctttggtgggaaggttatcaacgttatcaatggcaaaacggatacgttgttagaaatctctgtattaccgttggatagctatgcgaagcctgatattgaagccaactatcagggccgactgctcgccagacaaagcggcttccttgatccagtgaactatcgtaatcactttgttaccatcctcggcaccattcagggtgaacaacctggctttatcaataaagtcccgtataacttcctggaagtgaatatgcagggcatccaggtgtggcatttgagagaagtggttaataccacctataacctgtgggattacggctatggtgcattctggccggaaccgggctggggtgcgccttactacaccaatgcggtgagtcaggtaacacctgagctggtcaaataacaccaccgaaagatgcagatgctttctcagcatctgcatcatgcattacatcaaattaatacacagtaagctaactattattattataagccctgtcctgttaattacctttggcaaactgattataaagttaatgtccgcaccaggagtcggttatgtttcttataattaccagggatacgatgttcttcaccgcgatgaaaaacattctgagtaaaggtaatgtcgttcatatacagaacgaagaagagatcgacgtaatgttgcatcagaatgccttcgtcattattgatacattaatgaataatgtatttcattctaattttctcactcaaattgaacgattaaaacctgtccatgtcattattttctccccctttaatattaaacgctgcctggggaaagtgccggtgacctttgttccgcggactatcactatcattgattttgtcgcactcatcaatggcagttactgctctgtgcctgaagcggctgtgagtcttagccgcaagcaacatcaggttctgagctgcattgcgaatcaaatgacaacggaagatattctggagaaactgaaaataagcctaaaaacgttctactgccataaacacaatatcatgatgatcctcaatcttaagcggatcaatgagctggtacgccatcagcatattgattatctggtgtgaatttcaggcttacggtgagtctggctacgctgccacacagattagctaatactaacgcctttcacccctgccataccttttaataatcgcaacaggtcttctatgctcgttgtggcatgaagctggatatcaatggcgaccacttcatgatcttcattttcctgcaagctaactaaatcagtttttattttttgctgcttaaaccagtcgagcatacttaccgtattaccgttcactaatgtcagctgtaaatggtaatttttgttcatcaggcggaaggttaattgatggaagacttccagcaccaacaaggtcatcacactaccataaatacccagttcgtacataccgctgccaataaccatacctatggcggcggtcacccagatatccgctgccgtcgtcagacctacaatattttggttacgaacgagaatgttacctgcaccgataaacccgacgcccgtcaccacctgagcagcaatacggctggggtcgagtccgacgtgatctaaagacagcacgtcagcaaaaccatatttgctaacaatcataaacagggcgcttcccatgccaattaatacatgtgtgcgtaaccctgctcctttgccgcgcatttgcctttccatgccaatagcgccacaggcaattgccgcgagtataagacgtataataaattctgctgtcatataaaaatgcaaaaaggagcagcaagatggctcaacttgctactcctttttacttgcacctcattaattcggcaagtcattagatgcttgatttttgaaggtatacaaatttttctgcgggtttttcttacagtattcgatcactttaggaatttgagtgagatcggtttcatttaaagtaacggtatcgccacctttatatactgtttcttcatgcagcatccaccatgcaaccggggtcattgcttttggattcagatcaataaattcctggcaggtcatatctttagcggattcattggctgccaacgcagattgtgcgttcaccagactcaaagccgctacagcgcccataaaaataaacgctttacggagagaactaatattcattttgtaacccattcaatatagagattatatatgaacaggaggaatagctgcttttaaagaagatattccggcctgttcaatatgcaaggaagtacgatgtaacgcattcccggaattacatatctttcttaattttgtcccattcgcctttaactttatctttaaagttggcttgtttatcctgagtacaagcctgaacgatagctggggttacggttgcaataccctgaacatctaaaaccgcatcttctggtttatctttgttgttcagcgcttcagcaaaaccaactgcagttggctggaaggattcgtccacagccaggaaatcttcacaggtccaggagttgaccggttttttgttatcagctgctttttgcgcatccgctgcattgctcacaactggcagaagaagcagaccaccaagaataacgcctaatacttttttcatcgtaatatcctcaactataaagtgaaagagccgtcacgaatcaatttcgacactgaggttataacctggttttctgtatatgtcatgttgatggaaaatatcaaaatcagatatttttatttcaatacaatgagttacagatgcatcagatactgcaattaggaaatttttattaaatcgactgcattcttagacgcgtttttggcatagattgatagcaggggattttcttcttaattttatagggtggttctatgttatatatagataaggcaacaattttgaagtttgatctggagatgcttaaaaaacatcgcagagcaatccagtttattgccgtgctgctgtttatcgtcgggttgctgtgtatcagtttcccgttcgtctctggcgatattttaagcacagtagtgggtgcattattaatctgcagcggtattgcgcttattgtcgggttattcagcaaccgcagtcataatttctggccggtattatccggtttcctcgtcgcagtcgcctatttattgatcggctatttcttcatccgcgcaccggagctgggcatttttgccattgcggcatttattgccggtttgttctgtgttgcaggggttattcgcctgatgagttggtatcgtcagcgtagtatgaaaggcagctggctacagctcgttattggtgtgctggatatcgtcattgcctggatattccttggtgcaacgccgatggtgtctgtaacgctggtttccacactggtgggaattgaactgatatttagcgccgccagcctgttcagcttcgccagtttgttcgttaagcagcaataattaccccggttgtcacccggatcatagtcacttgatgtgactatgatccgattaatactctctccgctacgcagtgttgtagatcaattgcgcactatcattgaaataattacctgctagtgattatttcaacctactgaatttcatctaatttttttcactctatggcaaattagccatttcaaacattatcatggctgatattttccgtagtcaggtttaatgttttaaaagtgctgtgggaaagtgaacaaagagttccgtaagcgttgatgctatgggcggttaaataagtaatccgggttcatttttttgcaactggcgttgattacattgcataaatatccgtgtctccagacgctatataaaaacctgaagacatgaatgcgttatttactcaggtaatttcaatgcgttaaaagaaagctggcaatccaattgccagcttaagtcgaaacaaggagactcgatatttaaatcggattacattttaactttagtaatattcttcagagatcacaaactggttattgataacttattcttgggcagtaatccgcaaacgttaactttttgtttgctatttacaagctgataacaaccaggaatcttacttaggatcaatatatggagtgcgtgatggataaatctgaagtattgattagtgttaatagacgtattagttcacgaagggtaaagttcttataggcgtttactatattgaacaacgattcggacaaggatgtaaataatgaaaaggatgacatattcgaaacgataacggctaaggagcaagttatgatttttctcatgacgaaagattcttttcttttacagggcttttggcagttgaaagataatcacgaaatgataaaaatcaattccctgagtgagatcaaaaaagtaggcaataaacccttcaaggttatcattgatacctatcacaatcatatccttgatgaagaagcgattaaatttctggagaaattagatgccgagagaattattgttttggcaccttatcacatcagtaaactaaaagctaaagcgcctatttattttgttagccgcaaagaaagtatcaaaaatcttcttgagattacttatggtaaacacttgccccataagaatagtcaattatgttttagtcataatcagttcaaaattatgcaactgattctgaaaaataaaaatgaaagcaatatcacgagcacgctcaatattagccaacaaacattaaagattcagaaattcaacattatgtacaagctgaaactaagacgtatgagcgacatcgtcaccctgggtatcacatcttatttttaatcaggacataagcaactgaaattgatggctggcatgacgagggatgcagatgctgatttcattacccccggtgattactaaaggagaggctaaaacgactttattcccctggtatgtgtatccaccagtagaacccttcgttgcccgaatgctggcaggaactgttggcagaacggcaacattttttttgtcgttgacctcaccatgtcgatcactgtgcctgtatcccaccttactggctgacaaccccactatgccgctggtctgtaaatccctcatatctctcctcgcgcgcaatttaaagaaccgttatttctcaagaattttcagggactaaaatgaacagaagaagaaagctgttaataccgttgttattctgcggcgcgatgctcaccgcctgcgatgacaaaagcgcggaaaacgccgccgccatgacgcctgaggtcggtgtcgtcacactctcccccggtagcgtcaatgtgttgagcgaattgcccggtagaaccgttccttatgaagttgccgagatacgtccccaggtgggcggtattatcattaaacgcaactttatcgaaggcgataaagtgaaccagggcgatagcctgtatcagattgatcctgcacctttacaggccgagctaaactccgccaaaggcagcctggcgaaagcgctctctaccgccagcaatgcccgcatcacctttaaccgccaggcaagcttgctgaagaccaactacgttagccgtcaggattacgacaccgcgcgcacccagttgaatgaagcagaagccaatgtcaccgtcgccaaagcggctgttgaacaggcgacgatcaatctgcaatacgcgaatgtcaccagcccgattacgggcgtcagcgggaaaagcagcgtgaccgtcggcgcactcgttaccgctaatcaggcagatagcctggttaccgtacaacgtctggacccgatttatgtcgatctcacgcagagcgtgcaagatttcttacgcatgaaagaagaggtcgccagtgggcaaatcaaacaggttcagggcagtacgccagtacagctcaatctggaaaatggtaaacgctacagccagaccggcacgctgaaattctccgacccgacagtggatgaaaccacgggctccgtgacgttacgggcgattttccccaacccaaatggtgacttgctgcctggcatgtacgtcacggcattagtggatgaaggtagccgccagaatgtattactggtgccgcaggaaggcgtcacccacaacgcccagggtaaagcaacggcgctcattctggataaagacgatgtcgtgcagctacgcgaaattgaagccagcaaagccatcggcgaccagtgggtcgtcacctctggcttgcaggctggcgatcgggtgatcgtttccggtttgcaacgcattcgtccgggtatcaaagcacgagcaatttcctccagccaggaaaacgccagcaccgaaagcaaacaataacgttgcaggcttaaggggactttcatggctaactattttattgatcgcccggtttttgcctgggtacttgccattattatgatgcttgcaggtggtctggcgatcatgaacttaccggttgcgcagtatccgcagattgcgccaccgaccattaccgtcagcgctacctatccaggtgccgatgcgcaaacggtagaagacagcgtcactcaggtgattgagcaaaatatgaatgggcttgatggcctgatgtacatgtctagtaccagtgatgcggcgggcaatgcctctatcactctgaccttcgagactgggacatctcctgatatcgcacaggttcaagtgcaaaataaactgcaactcgctatgcctagtttacctgaagcagtgcagcagcaggggattagcgtcgataagagcagcagtaatatcctgatggtagcggcgtttatttctgataacggcagcctcaaccagtacgatatcgcggactatgtagcgtctaatatcaaagacccgctaagccgtaccgcgggcgttggtagcgtacaactctttggttccgagtatgccatgcgtatctggctggacccgcaaaaactcaataaatataacctggtaccttccgatgttatttcccagattaaggtgcaaaacaaccagatttccggtggtcaactgggtggcatgccacaggcggcagaccagcagctaaacgccagcatcattgtgcagacgcgtctgcaaacgccggaagaatttggcaaaatcctgttgaaagttcagcaagatggtagccaagtgctgctgcgtgatgtcgctcgcgtcgaacttggggcggaagattattccaccgtggcacgctataacggcaaacctgctgccgggatcgccatcaaactggctgccggagcaaacgccctggataccagccgggcagtcaaagaggaactgaaccgcttaagtgcctatttcccggcaagtctgaagacggtttatccttacgacaccacgccgtttatcgaaatttctattcaggaagttttcaaaacactggttgaggctatcatcctagtcttcctggtcatgtatctgtttttgcagaatttccgtgccacaatcatcccgacgattgccgtaccggtggttattctcgggacgtttgcgatcttgagcgcggtcggtttcaccatcaacacgttgactatgttcgggatggtgctggcgatagggttactggtggatgacgccatcgtggtggtggagaacgtcgagcgtgtcattgcggaagataagctaccgccgaaggaagcgacgcataaaagcatggggcagatccaacgtgcgctggtcggtattgccgttgttctttccgcagtgtttatgccgatggcctttatgagcggtgcaaccggggagatctaccgccagttctccatcacgctgatctcctccatgctgcttagtgtatttgtggcaatgagcctgacccctgccctgtgcgccaccattctgaaagccgcgccggaaggcggtcacaaacctaacgccctgttcgcacgcttcaacacgctgtttgaaaaaagtactcaacactataccgatagcacccgcagcctgttgcgttgtaccggtcgctacatggtggtctacctgctgatttgcgccgggatggcggtgctgttcctgcgcacgccgacctctttcttaccagaagaggatcagggggtatttatgaccaccgcgcagttaccttccggtgccaccatggttaacaccacgaaagtgctgcaacaggtgacggattattatctgactaaagagaaagataatgtccagagcgtgtttaccgttggcggctttggcttcagcggtcaggggcaaaacaacggcctggcgtttatcagtctcaagccgtggtctgaacgtgtcggtgaggaaaacagcgttaccgcgatcattcagcgggcaatgattgcgttaagcagtatcaataaagccgtcgtcttcccgttcaacttacccgcggtggctgaactgggtaccgcgagtggttttgatatggaactgctggacaacggtaacctggggcacgaaaaactaacccaggcgcgaaacgagctgttaagtctggcagcgcaaagtccgaatcaggtcaccggggtacgcccgaacggcctggaagatacgccgatgttcaaagtgaacgtcaacgctgcgaaagctgaagcgatgggcgtggcgctgtctgatatcaaccagacaatttccaccgccttcggcagcagctacgtgaacgacttcctcaaccaggggcgggtgaaaaaagtgtatgtccaggcaggcacgccgttccgtatgttgccggataacatcaaccaatggtatgtacgcaacgcctctggcacgatggcaccgctttctgcctacagctctaccgaatggacctatggtagtccgcgactggaacgctacaacggcatcccgagtatggagattttaggtgaagcggcggccgggaaaagtaccggtgacgccatgaaatttatggcagacctggtcgctaaacttccggcaggcgtcggctacagttggaccggactaagctatcaggaagcgttatccagtaatcaggctcctgcgctgtatgcgattagtctggtcgtggtgttcctcgccctcgccgcactctatgagagctggagtattccgttcagcgtgatgttggttgttccgttaggcgtcgttggcgcattactggccaccgatctgcgcggcttaagtaatgacgtctacttccaggttggtttgctgaccaccatcgggctttccgccaaaaacgccatcctgattgtcgaatttgccgttgagatgatgcagaaagaagggaaaacgccgatagaggcaatcatcgaagcggcgcggatgcgtttacgcccaatcctgatgacctctctggcctttattctcggcgtgctgccgctggttatcagtcatggtgccggttctggcgcgcaaaacgcggtaggtaccggcgtgatgggcgggatgtttgccgcaacagtgctggcaatttacttcgttccggtctttttcgttgtagtggaacatctctttgcccgctttaaaaaagcgtaacgtgtaaatgagagtaaggttgaacatgaaggttcagccttactctttcctgctaaccattcaccactcaacaaccagctaaccgtcaggaataccaggcttagtacacagcactgaaagtagaaaccactccagccattcgtcatcaatttgaacaacacaatactgacccacattcccgtaatcgtatgaattgtcagcttaataatcccaaacatgccgagtcttttcctcctgaaaataccgataccgcctggcaaactgcgaaagagaactagccggtagcccggcagaaatcatcagggaagagtttcacatgaagcaggtgtgagatcctgaccaatattcaaatgcgaaatatgtcaggaaaaggtacctgggctatgttgcgcaaactgatgtggcgttacaccataatattgtcgaaatgtgtttataaagtagcttgtactgctatagccacatttttccgcaatagtatgcagaggaatttgacgtaactcgagtaatcgtctggccatgctcatcctggaggcgagtaatattttactgaaacaggtattttcatcctgcaacttttttttgattagactctcgctggtatacattctttccgcgatatcgcgcagataccaacgtttggcgatatcaaagctaataaggcgttcaacttttccactaacagtgctgatgctattgaaaagtaaggggatcagttctttcttatgagaaaacatgcttaaacaggaaaggtagagcatattgctcagtatcggactatttaccccggattcattgaagctatcaaaaatcgccgtcaccagcggcatggggggactctggttaattaacaaacggtctttgctgtgtaaccctaaattgcgtggtagctgacgaatattttgtaagtaatggcaaactgtcagctcatcgatatccagtcgtcgcgtatccggactacaaaacgcaaaatcgtctgccaaatttttctccagcagcagaatactctcgttatgcaggcttattttttgctgttcatgataaatatcgaaactacgacgaatgaggatcacgctgcagacatgagtcatgattatcccttatatttcatactgcgattatttcaatttcagtatactaatgaaatgatgccagactgtttcttagcgcaaaaactgccagatttggtaggaccaaaatttatccacaaagtagttttgcataacagttaattgataataagtaaatgcagcacgaatatattttcgcacagcgtatagcttatgtttataaaaaaatggctgatcttatttccagtaaaagttatatttaacttactgagagcacaaagtttcccgtgccaacagggagtgttataacggtttattagtctggagacggcagactatcctcttcccggtcccctatgccgggttttttttatgtctgagtaaaactttataatcttattccttccgcagaacggtcagtgccgtaaaaattcccttgcgcaacaatacttgccgcgctgtcacggttgctcaatctctgcgcgcttcgctcctgatactctgtgggcgtcatcccataataatttcgaaagacgtaaatgaaatagctcacgctgtgatatccacaggatactgcaactcgcttaatactaaaaccatgtataacaataagttgcaaagcacgttgcattctacactcagtaagcaactgactataacttgtctcttcttcgcgcaattttttctttaacagacttggactcatcaacagctcgctggcgattcgggctagtgtccactcatgggcgatattattattgataaccgtacaaactcgtgttcgcatgttcggttgtaaaacgttcagaagcagcggtataaagtgctcatcctcaagaaaaacagataacaacgcaaagattaatgctcttttacgtagcatttctgcatagcgaagattcttattctggcttagttgcgcaacttcctgaaaaacaggaatatctctactacagtgatgaacgagtaaactagaaacttttttatgtgcatgaagatttaatgcctcctccttgagcatcgggagaaataaactaagcgtgtccctactcacgaatacaaaattttcaacacacttatctactcgaatttggcttgcatccgcaaaaaccaggtcaccgccattaaaatagcgatattcaccattaaccatggtgagaatatatttatgtcttgcatacgcaattagacaattcccatgtagactttgcatagttgacttaatattacataaacatattactgtttattaatgtagcacgccgccctcttaagtcaaattgattgataaataaatttaaacgaagcgggagaacaggatgataatgtgtgatgttctacgggcaggatgactggatttataatacaaaaacgtgtttaagaacacagggaaattaatagtaagcaaataatcccttttcgtgacattaaaggtaatcgctacatttaataaacattcatataacatatatcttatcaacacgatgaatagacagccaatatattattgcgattaataagcaaccgaatgcccagctgtttttttaaaggctgggcattcggtttttacaacgttatgttatcaggtgtgtttaaagctgttctgctgggcaataccctgcagtttcgggtgatcgctgagatatttcagggaggctttgtagtcttccagcaacagttcagcaaagtccatttcgaagccgcgacgacacataatgcgcatcaccacgatgtcggtggcttcaccgccgagagtgaaggccggaacctgccagccgcgcagacgcagacgttcagagaggtcgtacagggtgtatcccggatcttcaccatctttcagtttgaagcaaaccgccgggatgccttcgtccgggcgacccgtacagatgaactcatacggccccagtttggcgatttcatccgccagataagcggcaacctggtaagaggcgttctgtactttggtatagccttcacgaccgaggcgcaggaattcatagtactgtgcaattacctgacccgccgggcgggagaagttgatggcaaaagtaccaatttgaccacccaggtagtcaacgttgaacaccagttcctgcggcagcgcttcttcgtcacgccagataacccagccgcagcccagcggagccagaccgaatttatggccactagcactgatgcttttcacacgcggcaggcggaagtcccagacgatatccggggcgacgaacggtgccaggaagccaccgctggcagcgtcgatgtgcatgtcgatgtcgataccggtgtcggcctggaatttatccagcgcatcgtgcagcggttgtgggaactcatagttaccggtgtaggtcacgccgaaagtcggcaccacgccgatggtgttttcgtcacaggcttcaatcatgcgtttcgggtccataaacaactgaccggggcgcatagggatctcacgcagctccacatcccagtagcgggcgaatttatgccagcagatttgtaccggaccgcacaccaggtttggtttatccgttggtttgcctgcagcttccatacgcttgcgccaacgccatttcatcgccatcccgccgagcatacaggcctcggaagaaccaatggtgttggtgccaacggcctgaccatttttcggcgcaggcgcatgccacagatcggcaaccatatttacgcaacgcaggtcgatggctgcggattgcggatattcttctttgtcgatccagtttttattgatgctcaaatccatcaatttatggacgttttcgtcgtcccaggtctggcagaaagtggccaggttctgacgagcgttgccatcaagatataattcatcattgataatctgaaatgcgacatcatcgcgcatttcgtgcagcggaaatcgtttactctccgcgatagtagaaatggcctttgcgccaaaacgactatcgagtagttcactgcggaaatccgttaacagcttctggtccatttcgaactccttaaatttatttgaaggcaataaaaaagtaggatttatccgcaatggaagcaaggcattacaggcttaatttaaataacaaaatcctaagcagaaaaacgactttttataatataaacatttaacatgataatattaaaaacagactttattatcgtaataaaaatcgcccaaacattgctgttcgggcgatcaaattaattattgtttatcctgcatatacggcgtgtacaccccgttcagactgtgcaggaaagctacgatatcatccacatcctcctgcggcagctctttgcctacctgatagcgcagcatcagtttcaccgccccgtccagcgtcggcacgtcaccgcgatggaagtacggtgccgttaaagcaacgttacgtaaaccgggtactttctgacgcaatttatcacgctcttctttagtcacattcatacgaccaatatccgccgccgtaatttccccaaagttaaagtcttttttcagccccaacggttcaaaggaacgtccgccgagaataataccaccatgacaagttgcacatttattatctttaaataattgatagccttttttctgttgcgccgtcagcgcattttcatctccgcgcaaccatttatcaaatggggaatccggcgtaattaatgttttctcaaattcagcaatggcatcagtaatattttcgccactgaaaccttgcggatagacttcgaggaactgcgttttaagctgcggatctttttccagcttagcaataatttcgtcccaggatttgctcgccatttcaatcgggttcaacggcggtccaccagcctgatcctgcaatgttgccgcacgaccatcccagaactgctcaacgttaaatacactgttaaataccgtcggcgcgttaatcggcccaactgcgccaccaacaccaatgcttgtttttctgccatcgacgccccccgcattcaacgcatggcaatgagcgcaactaatggtgctatcagcgcttaaacggggatcgtgatacagcgcaaaacccaacgccactttttgcgcatcggtaggcagtttttgcgggatgggctgcaccggttcattgcgatgttccggagcagtatcattgctggcgtaatattccgcgcgctgttttgcaatccaggccagtatttccgcccgctcttcatcactcaccttacccgcccagtgtagcgcggtataacgcgttggtggcatagtttcatactgcatcacccattcaatcttattcaaatcgctttggctaacgggtttatcagccagcagtgccgcacgcacggcctcaaggttaaaagatttatatccaagcttaatgtcgtaatccatcaactgtttcgcgccaggaatataataataggcgggtaattctgcgctaggcgtgtggcaatagtcgcatcctttttcgcggagaaagcctaaaaccttattattttcactgacagcagatgcctgaacatcggcctgtttactgcgtttattatcgtggtaccacacataaccagataaccctaaatagcaaatcgcgacgccagccaggccgatcgcggtaatacgactgaccattttcattattcttccctcacggtggtgagttattgtgacccagaaaattttccagaatgctgcaaacgtctctgcgagacaaagccatcataaaaaacagggagatacgctttttgataggaatcaatcaattacatgaatataaactatcaataagatagcctgtgcctattacccagatcaggaatggcatatcatgattgcggcgagagcaggattgaatgttctgaaaatgaaaaacaacaccaaatcggtatttttataaattccattgatattagtgcgttatattttttgacaggttaataaacgtgatccaccgcacgctttgtcgcccaccaggcggagcgaatgactacccttaaagaaaagccgataattagcgacgaatttcggaggttggatccttatgctcaatcagaaaattcaaaaccctaatccagacgaactgatgatcgaagtcgatctctgctatgagctggacccgtatgaattaaaactggatgagatgatcgaggcagaaccggaacccgagatgattgaagggctgcctgcctctgatgcgctgacgcctgccgatcgctatctcgaactgttcgagcatgttcagagcgcgaaaattttccccgacagtaaaacctttcccgactgcgcacctaaaatggacccgctggatatcttaatccgctaccgtaaagtgcgccgtcatcgtgattttgacttgcgcaagtttgttgaaaaccacttctggctgccggaggtctactccagcgagtatgtaagcgacccgcaaaattccctgaaagagcatatcgaccagctgtggccggtgctaacccgcgaaccacaggatcacattccgtggtcttctctgctggcgctgccgcagagttatattgtcccgggcggccgttttagcgaaacctactattgggattcctatttcaccatgctggggctggcggaaagtggtcgggaagatttgctgaaatgcatggccgataacttcgcctggatgatcgaaaactacggtcacatccccaacggcaaccgcacctattatttgagccgcagccaaccaccggtttttgcgctgatggtggagttgtttgaagaagatggtgtacgcggtgcgcgccgctatctcgaccaccttaaaatggaatatgccttctggatggacggtgcagaaagcttaatccctaatcaggcctatcgccatgttgtgcggatgccggacggaagcctgctcaaccgttactgggacgatcgcgacacgccgcgtgacgaatcctggcttgaggacgttgaaaccgcgaaacattctggtcgcccgcccaacgaggtgtaccgcgatttacgcgcgggggcggcctccggttgggattactcttcccgttggctgcgtgatactggtcgtctggcgagcattcgtaccacccagttcatccccatcgatctgaatgccttcctgtttaaactggagagcgccatcgccaacatcagcgcgctgaaaggcgagaaagagacagaagcactgttccgccagaaagccagtgcccgtcgcgatgcggtaaaccgttacctctgggatgatgaaaacggcatctaccgcgattacgactggcgacgcgaacaactggcgctgttttccgctgccgccattgtgccactctatgtcggtatggcgaaccatgaacaggccgatcgtctggcaaacgccgtgcgcagtcggttactgacacctggcgggattctggcaagcgagtacgaaaccggtgaacagtgggataaacccaacggctgggcaccgttacaatggatggcgattcagggatttaaaatgtacggcgatgaccttctgggtgatgaaatcgcgcgaagctggctgaagacggtgaatcagttctatctggaacagcacaaactgatcgaaaaataccatattgccgatggtgttccccgcgaaggcggcggtggcgagtatccgttgcaggatgggtttggctggactaacggtgtggtacgccgtttaattggtttgtacggcgaaccataatatttttacagccagccgctaacttcctgctggctgtaaaattatcctcttcaggaggagatatttaacatcattgccgcctgggtgcgatttttcacttccagacggcgatacagggattccagatgcgcttttaccgttccggtactgatattcagcgctctgccgatctccttattactttcgcccgccgctaacatggttaaaatctcccgctggcgggcgcttaagcttttgagatctttaatgtccttttccggcgtcgtccgccagtctccaggcagaaacatcatccccatcgccgcactatttaccgccaacgcaaatgtctcgacggtactatcacgaggcacaatggccagcacattaaaatggataacttcctgtaaccaccgtttattgcaatccgtcgccgtaattaacaccttaacctcaggaaattgcaccacggttttttgcagcaaccagtagcaaaactcaccatcctgatcgccatcgagcataactaaggcttcagggtaactttccagcttttgccataactcgtctgcctgactggccccctgaatactcactcctggaatacgctgctgtaaactgattttcattccatgaataaatatactctgcctgtcaaacatgactatttgcataactgaatctccacctgaatacgttaaaaagacttaagtagtggaagggtattacccgcgagaaaaaataagaattcgccatttggcggtggccattctacagagatgacgtgtagaaaatagttaccgatataaatagttacagctaaacgcctgaaattacatgtcgagggcactatttaaaacaattttgaggatttccttatattggtggttagtacgcatgcaattaaaaatgaaattccgcgaccacaagccaaaataacaaacggcaaggagacaaaaataagcacaaatagccaacacgtcctctgttcactttaaagggaatcgctgaaaaatacgctctgtttaaggggattcacctttctcagaaagctattccgcccttttcctgctgagaaatcgccacattcggcatgacaacattgtgaaacccggcattagatgttagaaaaaacaataaacaatgcgatatgcgcgttactgtttcgctgtgaacaacaaagcgtcaaagaaatggataaaattcacgcaatgcagttgttcatcaaagtcgcggagctggaaagtttttcccgcgcagcggatttctttgctttgccaaagggaagtgttagccgccagatacaggcactggaacatcaacttggcacccagcttctccagcgcaccacgcgacgggtcaaactcacgccagaaggcatgacctattatcaacgagcaaaagatgtgttgagtaatctcagcgaactggacggtctgtttcaacaggatgccaccagtatcagcggtaaattacgcatcgacatcccgccaggaatcgcgaaaagcctgttactgccgcgcctgagcgaatttctctatctgcatccgggaattgagctggaactgagtagccatgaccgtccggtagatattcttcatgatggttttgattgcgtgatacgcactggcgcgttaccggaagatggcgttatcgcccgtcccctcggcaaactgaccatggtcaactgtgccagtccgcactatctgacgcgctttggttatccgcaaagccccgatgatctgactagtcacgcaatagtgcgttatacaccgcacctgggtgtacatccgttaggttttgaggttgccagcgttaatggcgtccagtggtttaagtctggcggcatgttgacggtaaacagtagcgaaaactatctcaccgccggtcttgccggtctggggattattcagatcccgcgcattgccgtgcgcgaagccctgcgtgccgggcggcttattgaagtattacctggctaccgtgccgagccgctctcccttagcctggtttatccgcagcgtcgggagctttcccggcgtgtaaacctgtttatgcagtggctggctggcgtaatgaaagagtacctggactgaccgactatactttttaagaatgaccacgacagaaggacaaaagagcggatgacgcaggaaaacgagatcaaacgtcccatccaggatctggagcacgagccgattaagccgttggataatagcgagaaaggcagcaaagttagccaggcgctggaaaccgtcaccaccactgccgaaaaagtccaacgccaaccggttattgcgcacctgattcgcgcgacagaacgctttaacgatcggctgggtaaccagtttggtgcggctatcacctatttcagttttttgagcatgataccaattttgatggtgagctttgccgcagggggctttgtgctggcctcccatccgatgttgctacaggatatcttcgacaaaattctgcaaaacatcagcgatccgacgctagccgccacgttgaaaaacaccatcaacaccgccgttcagcagcgtacgactgtagggcttgtcggcctggcggtggcactttattccggcatcaactggatgggtaacctgcgtgaagcgattcgtgcccagagccgcgatgtctgggaacgcagcccgcaagatcaggagaagttctgggtaaaatatctgcgagattttattagcctgattggtttgttgattgcgctgattgtgacgcttagcatcaccagcgttgccggtagcgcgcagcaaatgattattagcgccctgcacctgaacagcattgagtggctgaaaccgacgtggcgattgattggcctggcgatttccatcttcgccaactatctgcttttcttctggatcttctggcggttgccgcgccaccgtccgcgcaaaaaagccctgattcgcggaacatttctggctgctattggttttgaagtgattaaaatcgtgatgacctacaccctgccaagcttgatgaaatccccctctggcgcagcatttggttccgtgctggggctgatggcatttttctacttcttcgcccgtttgacgctgttttgcgcggcgtggattgccaccgccgaatataaagacgacccgcgaatgccggggaaaacgcagccttaaaataggccggatgcggcgtaaacgccttatccggcatacgattttattcggcctggctccccgtaggccggataagatgcgccagcatcgcatccggctataatgcgcacataacctcttgaaactcgtccccagagcctcttcagccatctatttgggagcaaacaatttcattccaactcataaccccagcatataaatccagttggtaacttttatttaacctgaaaccagttttatccactatttataaaattatgtgaagcatttcatagaagaaaaatcactggcctaaacattatcccctttttgcctgatttttgaccatttccgcgatttgttacacattgaaatatcacttttgctgtgcgtaatatggctattcgttagccaaaaaataagaaaagattatgcaagcaacagccacaacactcgaccacgagcaagaatacacgccgatcaacagccgtaataaagtccttgtcgcctctctcattggcacagccattgagttcttcgacttttacatttacgccactgcggccgttattgtgtttccgcatatcttcttcccgcagggcgatcctacggcagcaacgctacagagcctcgccaccttcgccatcgccttcgtcgcgcgccccattggctctgccgtttttggtcattttggcgatcgcgttgggcgtaaagcgacgctggtcgccagcttgctaacgatggggattagcaccgtggtgattggtctgctgccgggctatgccacgattggtattttcgccccgctgctgctggcgctggctcgatttggtcagggtctgggcttaggcggtgaatggggcggcgcggcgctgctggcgactgaaaacgccccaccgcgcaaacgtgcactgtatggctcctttccgcagctgggcgcaccgattggcttcttctttgccaatggcactttcttgctgctttcctggctactgaccgacgagcagtttatgagctggggctggcgtgtgccatttatcttcagcgcggtgctggtcattatcggcctgtatgttcgcgtgagcctgcatgagagcccggtgtttgagaaagtcgctaaagcgaaaaaacaggtgaagatcccgctgggtacgctgctgaccaaacatgttcgcgtaaccgtactgggtacgttcattatgctggcaacctatacgctgttttacatcatgacggtctactctatgacctttagtaccgccgccgcgccagttgggcttggcctgccgcgtaacgaagtgttgtggatgttgatgatggcagttattggttttggcgtgatggtgccagtcgctggattactggctgatgcctttggtcgccgtaaaagcatggtaatcatcaccacgctgatcatcctgttcgcgctgttcgcctttaacccactgctcggttctggcaacccgattctggtttttgccttcctgctgctggggttaagtctgatgggtctgaccttcgggccaatgggtgcgctgttaccagagctgtttccgacagaagtgcgttacaccggagcaagcttctcttacaacgtagcgagcattctcggggcttccgttgcgccatatatcgcagcctggttgcagactaactacgggctaggtgcggtggggttatatctggcggcgatggctggcttgacgttaatcgccctgctgctgacccatgagacgcgacatcagagcttgtaataagagtgaaaagcctgatgcgctacgcttatcaggcctgaatttccatacaatatattgaattcgcaaggatttgtaggccggataaggcgttcacgccgcatccggcatgaacaaagcacactttgccaacaatctaaatctgtttaattgccggatgtcagacatccggcaattatcatcacttcttcatctggctcaaaatcgtccgacactgattagcctccccttcggaaggactgatcagtgccagtaacgccgccgccggtgttaccagcgttgccagtgccgcagcaacagcaccacgggcaatcagcggtccggctttcaccccagcctgcggatttttaaacgtcccccgcacatacagcgggctacgcagtgtgataatccgaattcctttactctccggatcaatagtcaaatccagctgttcgctagcaaaacttgccgtgccggtaacattaatcaacgcgttctcagtatcgaaagcaaaaatctgcgggcgcgccacgccgttggcaatattcagattcgccgccgcgcagttcacccgcacctcatcatcaccaaatatcgcaccgacaatgtagttgccgacattcagcccaacaatctccatcaggttgcggctcaccagcccgtcattcatcaacagtttcaggttgccgttactgttgcctaaaagtgccgccacgctgttaccgctaccgcgtagttccgcgtcaccgttcatttcccccagcgtcttctgcatcagttccacatcgggcatcagttctttcagtttcagtcgacgagcctgaatatctgcccgcccctgcatcggctttttatcgccttccagatgaatattcgccgcaatgctgccgcccgccatgccaaatttcagcggttgcaggcgcaggtcagcatttttgaggatgatatgagtagaaagatcgctaatcggcaggctactgccatgctcaatgcgccgccctttgaagcgaacatcggcatccataacgtcccatttatcggtttcgaagcggtcataaggcagcactttgcccgcaggctgaacgcttttttcgcccttcttctgttcagaccgtttgctcttttctgcccctttcccggaatcaacgccaatcaacggtcccaggtccgccagccgcaattgccggctctcgacatcaccttccagttttggtcgtggctttccggtggtgtagaccagagaaccgtggatatcgctatcaccaattcgcccattaaaaccgcgataatcaaagacgctgcttttttcagtgtcgattttcgctaccagccgaccatccgtttcaaacggcggggtatcgggcagcagaacgcccgtcagttcatagagatcacccagactatcgccagaaaatttaagccgtaaatcgacaccgcccatcttcattgggtcattcacgacgccatcaaaagcaacacgggtgttaccagagcggaaatcagcctgtaccggaaacggcgtcccttcgccacgcagcgccagcataccgcctatttttcccgtacccgtgagcggttcaccgttatatcgtccctgcgccttcaggccaaaaacgtaatcgcccaccttttctttatccgctttacctttgcttccagtaacttcgctgaacggcagcggcttgcctaagggatcaacaaaaatctccagatccgctttgcttactttgtcatcaatggcgatccgcccttgatcgaaaagaatattatccagccgaaagctccatgcgctcggctttgcattcgcgtctttgttatcatcgttggcaagattaaacgtccagttattgttcttttcagagaggcgaatcaggcgcgcgtcgggcttttcgagcttgatccacggcagccagaccgttttggtcagcagcgccagcggggccagcgttgcctctacgcgtggcaaatgcaccatcgtgacttcgggaatatccggtggattgccaagaatgatgtcttccgcgtgtacatggggccacggcacccagctgcgccagccagtttcttgtttttgccgctcccacaccacgcccagatcgccacggatagcgaacggacgattcaactccgcagagactttctggttgatagtcggtttgagtcgattccagtcaaaagttgcaatcaaaatgatcgccacgacaatcaacaacaagaaagccccactaatcgcagcggttattttgcctgccttgctcatcgttcgcttcctcatattcttcctgtgccagtcctaaagatagtccagccaggcggaaaatgaggcagcttatagcgccagaaccgccgtattcagcgtttctatcggtgccgggcgactaagaaaccagccttgtgcggcgaatgcggggctgttctgaacatcacgccactcttccggcgtttctacgccctcgacaatcaccccgcgacaatagcgattcattagatgtaaaagctgagaaaagagtgtgcgtccttccgggctctgacgcagcatcacaaacagttctcgcgcgattttgatgtagtcataacgcacttcacttagcgcagagaaatttgccatcccggtaccaaaatcatccagccacagcgggccaaattcacacatgctggcaaaggtactatctttcggcagacggatatgctccaccagttcgaaacgcagccagggaagacgctcaatctggcgcaggatttttggttgctgacgcagggcgatgagcgtagggccatcaatattgacgcttgccagcaggccgtgctctataaagaagtcggctttttgcgccagcaaatcaatctgctctttcacaacctccatccgatggctgacggtgatttcagtaaaatagcgatccggcggcaggcgttggctagggttcaagggatgcgtgaccaccgttaatagctccacggccattaaccgcccgcatgtttgatagatcggctgccaggtgtaagcacgctcacactgcaaccaaaaacgccgttcctgcaagctctcgatgcttgcttcagggttgcttattcgctggataacctgccttatcatcaaagatgtcctgtgtttaaaagtgatgctgcccggactcgacaaagattatcggcgcgtaagggcagaactttaccgcctggccggggtaaatttcctcactccacaacggaatctttcaggaatacgttctggctcaaaaaaataatggaacactgttttaatatggttgaccagcaaaccaccacagcgcaaactaacgctaattttttacagatcaggttcacgactatgtccaaaaagattgccgtgattggcgaatgcatgattgagctttccgagaaaggcgcggacgttaagcgcggtttcggcggcgataccctgaacacttccgtctatatcgcccgtcaggtcgatcctgcggcattaaccgttcattacgtaacggcgctgggaacggacagttttagccagcagatgctggacgcctggcacggcgagaacgttgatacttccctgacccaacggatggaaaaccgtctgccgggcctttactacattgaaaccgacagcaccggcgagcgtacgttctactactggcggaacgaagccgccgccaaattctggctggagagtgagcagtctgcggcgatttgcgaagagctggcgaatttcgattatctctacctgagcgggattagcctggcgatcttaagcccgaccagccgcgaaaagctgctttccctgctgcgcgaatgccgcgccaacggcggaaaagtgattttcgacaataactatcgtccgcgcctgtgggccagcaaagaagagacacagcaggtgtaccaacaaatgctggaatgcacggatatcgccttcctgacgctggacgacgaagacgcgctgtggggtcaacagccggtggaagacgtcattgcgcgcacccataacgcgggcgtgaaagaagtggtggtgaaacgcggggcggattcttgcctggtgtccattgctggcgaagggttagtggatgttccggcggtgaaactgccgaaagaaaaagtgatcgataccaccgcagctggcgactctttcagtgccggttatctggcggtacgtctgacaggcggcagcgcggaagacgcggcgaaacgtgggcacctgaccgcaagtaccgttattcagtatcgcggcgcgattatcccgcgtgaggcgatgccagcgtaaacgcagcatatgcaaaaggctggataaagtgttacccctctatccagctcatccataaatacctgatggttgtgctaactcatcaccatcaggcattactgtgcaggtggaatatccgtcacttcaggatgtacgtcatccgtggcgacagaggtggtcgcagcggcggtagatggggccatgatttgatcccagaccgcctgcaacgctttcatgttaaattccggctcgcctttcggctgcagcagtattaacgccatatcattgctcaactgttgacgcagatcctgatttaacatctctaccgtcaggctattaaggaaatcctgccgcagtttctgatattgctccggcgcgatatcgacaacctgattttgcaagctacgcatccgctgacccatcagaatatcggtatcagctcgtgcataggcggcaaacagtttctgcagctccagtttcttttgcgccactaacgcattgaactcttcttccggcagacctttatcgcgaaccttcgccagttcacgcgccaccagattaaggttgctgttcagcttgtcgtttggactttcgatgttgatggcacactgcgcacgcagatacagcacacggcagtcaaatccaagaccgatgtctttgctgttactggcacttaacgcttgctgaacatgccagaacagcgcctcgcgggccaggtccgcacgccagtagcgcagcagtgcggcactttcacgaatcggctgccacggcgtatcccacatgatagataaccggtcctgacgcaccgcgtcagtcataatactcaccgcttccgcacgcagcggagaaagcgtcggcaccggagctggcgtttcacgtttgcctttcagttcgccaaacgttttgtttatttggtcgacaacgctgcgcgcatccacgtttcccaccaccagtagcgtcattgcatccggggtgtaccatttctgatagaaatctttaattttttccgcttcaacgggttgtttcagcggatcggcaggatcgtgacctaacaaggtactccctttcagacgatagcgccaccagccctctttagtatcggcaggccaggttgccaccatgtcctgactttgcagcgcgtggttgatggtttctggtgtgatggtcaatttgccagtggcatttgccagataagagagcgcttctttcagcaaatcgttacggttattgggcaaactcagattaaacagcgtggtgtcataagagacaattaccggcggcatcgggcgtttagggtcgatcccctgctgccacaaactacgcgcctgtgctgcgtcaaggccaccgctttgcgttagcgcaatacgagggatggcgtgactgtaaccgctctgttgtgtactttcggcgaggctaccggtattaaccagcaggcgaatttcaacacgatcgctgggacgctggggggtggtcagcacttgccactgtaaaccgttggaaagcgtcccctgttgccatgctggatcaggctggagcgcatctgcctgcacatagccagcagtggccatcatcagcaaaccgcccgctaaaagtcgaatttttgtgccctgcatgtgaacccctgatcaactatcctggtaataaaaaaactgcccgttgtcggtcagtctaaatgacgttaaaaacacttcgtgttagaccgcaagaacatgaaaatgtcacggaagaagtgaaataaacctgaactcacccaggtggtaagttcaggcacaggggtcaattatgcgcaaacacccgcactcggggaagggagtgcgggcataagtgatgagattaagaggataattcgtgcgttttgccatccggcgcacgattattcagcacatcgtccagttttttgtggtccagttctttcacccacttagcaacgacaatggtcgctacgccgttaccgaccaggttagtcagcgcacgagcttcactcataaagcggtcgataccgaggatcagcgccagacccgctaccggcaaatggcccaccgcagagagcgtcgccgccagcacgataaagccactacccgttacccctgccgcccctttagaagaaagcagcaacacgattaacagcgtgatttggtggacgatatccatctgactgttagtggcctgggcgataaacaccgccgccattgtcaggtatatgcttgtgccatcaaggttaaagctgtagcctgtcgggatgaccagccccaccacgcttttacggcagccgagtttctccatcttgtcgagcatacgcggcagcgcgctctcggaagaactagtccccagtacaatcagcagttcttcacggatgtagcggataaatttgaagatactgaaaccagtcgctttagcgatactacccaataccagcaccacaaacaggatacaggtaatgtagaaacagataatcagctgccccagttgcaccagtgtgccgacgccgtatttaccgatggtaaacgccattgccccgaacgcaccaataggtgccagacgcatgatcatattgatgatgccgaagatgacctggctgaaactttcgatgacgttaaaaatcagttggcctttgctgcccagacggtggagcgcaaaaccaaacagtacggcaaacagcagcacctgcagaatgttaccgctggcaaatgcgccaatgacgctcgccgggatgacatccataatgaaggcgacaatgccctggtctttcgcctgatcggcgtaaaccgctaccgctttcgcatcaagcgttgccggatcgacgttcattccggcaccaggctgcacgacgttaacgatgataagaccaataatcagcgcgatggtactgacaatttcaaagtaaagcagtgcgactgcgccggtacgaccgaccgccttcatgctttccatgcccgcaatgcccgttacgacggtacaaaagatgacaggagcgatgatcatcttaatgagcttaacgaagccgtcgccaagcggtttcatttgctcgcctatttcaggatagaaatggccaaggagaataccaatggctatcgctgtcaggacctgaaagtaaaggcttttaaacagagaggttttcatagggtgtcctttagtaaaaccacaggtcttgtaaggttatggggtacctgcggccttaaaataacacccagacaacatcacagaaatgtacctggatcataattgaaacaaaaaggttaaaaagtttgagctggctcgcacaaaccagcactttttaaagttttgtaatcagtttggggtagttacttttcttccaggtaactctcttcgaagatttcaatagggagtgggcgagcaaaaaggaagccctgggcaataccaacgcccgcttttgccagccagtcgcgttgtgcttcagtctccacgccttcggcaatcatttgtaagttcaggctctgcgccagcatgataattgcagcaatcatgctgctatctcccggcaagccttcaacaaacattttgtcgattttcagtacgtcgattggcaagcttttcatatgctgcagctgacgcagccctgcgtagcccatgccgaaatcatccagcgccacccgaactccggcattgcgcagcggacggaggattgccaccgcagcatgagggtcgtcaatacgtcggctttctgtcacttccagaatcagtgttcccggctgaatgcgatagcgggttaacagttccagcatatccgccaccatattcgggtgcatcagttgcagcgcagagaggtttacgctcaagggcagcataatgccgcgctcttgccaggctgcaagcaatcgacaggactcttccagcacccagtgaccgacggtaaccatcagcccacagcactcaatgcgatcgattaagccatccggcaggtcccaactgccatccggttgctggatacgcagtaacacttccgcactgaccagtttaccgctggtcatctcgacctgtggctgtaaccaaatagcaaactgatgattttccagtgcattaaggatatcgctctcttccgtcaaccgcttctgggcggcttccatctgctgcggatcaaagaactgaatctgattcttgcctttatggcgagcggtaaatgccgcagaaatagcgcgactgtaaagctgttcggcggtgagatcgccgtagaacatcgccacgccaatgctacagtgcggacggagttgaatacgttcaatcggcaggcgctcgctcatgatagtgagcacttgctgacctaaggtgattgcgtgccacggttcctgtacaccgttggcaatgacagcaaagtcataaccgctaatctgcgcgaggatcatacgtgggctcagtacgcttttgagtttttccaccagcgtcagcagcagaatttctcgttgcgcctctttcagcacgcccgcagtatcacgcagggtttcacaggtgatgatcatcagcgcggtggtttgtttacgcgcgacaacctgctccagcatctccatcagcaaggctttgttcggcaaatcgctcaccgggaagcgcatcgcattttcgttctgttcttcataatggcgctgcagcaattgctggttgaggttgtaactgcgcaccaacataccgatttcatcgtcctgatgcagacgcggtaatgccagttggtgaccaacaagctccttggctgggatggcgttaagttcgcgagcaatattgcgtaacggatgcaaaatcaggcggttaatgcaccagctgatggcgacggtcaggataaggctcaaaagtaagtaaatggtcactaacgtactgagggtgctcatcacgaacttatacatacggaaggaatccgcctgtagtaccagataggcaattggctgcgggtttgccggacgttcgaggctgtaaacgcccaggctgatttgaaccggtagctcaaacaggcgagtaaccattaccggcaccgggcgctctggaataaaacttttacgcagcgcctggaactggttaggcagcactacatcggcacggctgaccacgcctgccggtttaatgctggcaagaatagcttccgcttcgggaatatcgcctttcaaaatagcactagataagggttcgcggacagagcgagcaatgctttccagttgcgtagccgtgttatagcgattctgctggaccagatggaacagcaaaacggtgcaaaaaataaaaacgaacaccaggacaacggctgccaccattgccatctgcttgattgttaacgagcgacttacgcgcaaattgtctccccccggaaatcccagattgccgcccgagtatacccgatcgcagcggcattaagagaggcgctatctgaaaacttaccagtcggcgtaaggtatcagcggctgcggcggtaaatccatgtcaccctgccatccggcggcggaataacgtacgtagagcaggaaatggctgggtgcgtaatctttcgcctgctggatatcaattgccgtgccaacaaaccagttggaagtaacacgtcgttcaagtaatgcccgcgccgtgtagccgaagccctgactgctgccgccatcgttggattgccgcgcagcttcttcctgccagtcggtcgggatcagattcatcagcggataacgcggcatggttttggtgcgactatggctccagctgccagacgcacccagctcccagctccagttttccgtgcgctcccgccacatcaccggtatggcaaagctcaggtattcctgcggactgtagtaaccgccctgaccgagactgtagccactcagatctttgtcgtaatgccagatcatgttgttcaggccgattgtgacgcggcgattgttctggttaatgaccttatagtaatagcccgtcatccagcgcacgcgccagttatcttcgacatttttaccggttaactggtcgccactaaggcttgcccagacgccgtttgcttcacctttatcgtagctcagacttagccccacaccgtcggcacgtacgccaccccattttttcccggtattgctcggggagtctttttgcccaccaaaggccagcaaagaactggagatgggccgacggtgggcgttaacggtgtaacccagcggcccgatatcatcgctgtaactgatgccgccgaccacatccaccacgttgaagcccatcggcgtggtaccgatatcccagctccagacgtcatttcgccagccgaccgccacgctggcaccggaatcgctctggctgcggttgccgctacagtcctgtaatgtacaggtgccccagttgtcatcccatttgccatcggcattagtggagaaactgccgacgttcatattgacgaaatcactgcgaaagaacatccgcccgtcagaatacggcgcatccacctgcaacatggtagtgtgcgctttcagatcggagtaaccaccggtgccgctgctaccccagtaatcgtgctcaagggtgacgttaagatcctgctggcgatagaggtccgccgcatcgctgcgcacgccacgtttcagccagtcatctttctcgtcgttacgggtcagtcgggtaaaggtgtcgttatcctgcggacgcgtcgtagtcacaccggatgcgaccatggcgtctttgtaggtttccagcgcctgcgttggatcgcccgcctgcgcttcaaacttcgcaccatcacgcagcaccatcgcgctttccatgctcggtggctgagattttgcctgcgggatcaacttattaaacgtccgctgcgctgctgcggtatcgccaagctgcgcctgtgccagcgccacgcgccgctgtgtgttcaggctggcgttatcggtagcgggcagtttcgccagctggctacgtgccgccgctttgtcaccggcagcaatatccacttccgtcagaccaagaatggcgtcggcgttagctggctcccgcgtcaggacattctgatatgcagcgcgggcggcggtgtaatcacgtcgttgttgcgcccagtcagccagcgtgaggtcaatacgcgtggaaggtggttgctggcgcagcatcgcttccgcttctgcctctttgccgctttctcgcaggcggttagcggtttccagcacctgatcgctttgcagtcgattaaccagctcctgaatattgctgttccactgcgcacgcggcaggctattgatatgcgccagcgccgctctgtcctggtcatgaccagagaggtacagcccgtaagcgtaaacctgctccgggtcgttgctcttctgctgcgccagattgcgcattaacgtatcggcctggctgcgttgtccggcctgccagagatcctggctaagtcggtaagtaatccatacgctgccggggtccagcgccagtcgttgccgctgaagtgctgccgcctgcgcccatttgccctggttttccagtgcctctgcctgctgtgccagacggtcgttttgcaggctgcgttcgatatcatcaatgctacgccgctgactggcagagaggctggcgataaacgcttcagctttttctgggctttgctggcggtaaatatttgccagcccgcgcacggcgttagtgttgccgctgtccatacgcaaggtctgctgataataacgttcggcggcgggataatcttttcgcgccatcgccacatcgcccagccccagcactgcataactgtcggtgttatcgacattacgcgcctgctggaacaggcgttctgcccggtcaggattattggctttcagcgcagcatcgccctgctggatcgccagccagtagcggtttactttcagcagactgttccatttgtcgttgttgctgctgtgcgggtccagtgcgagggctttttccagattcgccactgcattggcgcgatcgcctttctgagaatacgcctggcccagcgcccccagagcttcactgtctttcgggttcgcccgcaccgcctgttgtagttcgggaatggctttacccgccataccagagtccaccgccgctaaaccttgcgcacgagcgcggaaagcaggatcggccagctgtttttgctgttctgccagttggctttgcgcagccgccacgctatcgccatcactaaagatgctgagatattttttcagcgcgctcacactggcatcactgacgggcatgtctttaatctgcccgtaccagattttagaggccccttcgcgcccggcgttgctttttgccatctgttccaggacggcaaaaccttcgtcacggcgatcgctactaaacagcaatagcgccagattgttttgcaggcccgtattgcccggtgcatccgcattgatgcgttttaactgattaatcgcttcgccacggcgagccggaattttcgccaccgtactccagtactcgacagcaatgtcaccttccggcggcgcaccgttgaacagtttgttgtaactcgccacagcttcttctgcatgaccggtcgtcgcctgcaatcgtgcctgttgcagtgcctgacgaccatccggcgtggaaagtagcatcgtagtccggctgcttttatacgcattactactcggcgctaactggctcagccgatcgagctgtttttgcgcgccatcaatatcgccctgacgtaacaaagaacggaaacgggcggcaacgacgtccgggttattcggatcaataagttccagccgatataagctctgttgcaccagatcttcacgatgggtcgcttcgcctaaccgaacttgctccagcaactgttgctgagcggttggtgctgcctcgaccatcggcatgacggccagaccgagggaaagcgtgaatatgtttagtgtgaatttgcgcattcctggccccagtcaggtaattactttagtgactatttgcgcattcctggccccagtcaggtaataactcaccttttgtgctgaagcggaaacggtgttgatcccagccttgtccaaacagggtcagcacatagttgtaataggcatcgctgccgggaaagttatcggccacgcgctggcgctgaacggcctgcgcatcgcggttttgtaaaaagggcagcatggcggcagaaaaaccgactggtcctttaccctgcgctttccccgtagccacatccactttttccggcggataaccgtttttctcagtgaatgtcgccatcggtttaaaccggttgagcatccgcgctttttgcggatcgctgtcaggcatcatgcctacccacatgtaaacgcggatagcgtcgtagctgctgatcaatgttttttcggcttttagctgccagcctttgtctttctcatagcgcacccagtctgggctaaaacctttcggggcggtttccagcaataaacgttgattggtttcgcgcagcgtggtccacggcgcgccaaagcgggtgaaatactgcgccagcgtcggcggcaggtagctggggttaaaacgccagctgttatcctcagcaaaacccactttgcccggtaacaacatggaacccagcccaggcaccgtcaccacttcctcccgcgcgatacgttttagcaacgcgctgccgatgtcggtataacgctgctctttccacaaacgccccgcctccagcaagctccaggccatccagacatcaccatcggaggcgctattgctgtccagcacttcccacttactgttctctttcttgccccacagccaggcgggcaaacgttcttttaaagaaccctgagcgagattgttctgcgtccagtcgagaatattatcgaaagctgcacggtcgttagccgccagggcagagaacatgccgtaactttgcccttcggaggtggtgattttgcgcgcgtcgctggggtcgatgacgcgcccttcctgactgatgtaatcctttttaaactgctcccaggcaggccaggtacaggctgcctgaacactaaaggcagccagcagcagcatcgtcacgattccactacgcaacacattcatcttcaattactcgttatccgggttaagacgacgacgactaataattcgcagcagacgccacagtacccatgccagcaatatcacactgatagccgccagcaccgccagcagaatcggatggtttgccagcgcataccacacgcgctcgaaccacggcagatgacctacgtaataaacgtcgccaacacgtaggctgttgataccggactcgcggatcaccgcgacgctaccgaacatggtggcgcgtttgccgctatcgttcaccgcatcgttaagcatttcataaccgcgtgggctatctgccaacagcgcaatcacgctgcgctggtcgttatacgggctctggaagccaatcaccgccgccatcgcaccggaagaggtcagcgtactccgggtttctgccgcgcgatcgctctcgtccggcacaatgccggggaacggggtctggcgcatcggtgttttcacccagctttcggtcgcctgcaccaataggtcgatctgcttatcgtctttcagtttgtccgggataccaccgatgatcatgatgtcggcatctttgccctgaatggtgctgccatcatcggtcaccgtcagattaatcgccgggaagcccgtctgtgcgccgataaaaccaacagtattcagcaacgtttccatctgtgcttcgttaggcgctttcggcatcacggtgatggtttggctcagatccgccatccggctgaatgggaagcccgcgttagcaaaggcgcgtagatccggcatcgggatgaagtggtaatacttgctgaagtcgatggtggagtcgtcaccaatcaccacatgattctgcaccggctggaaggtaatacagttatccacgctaccgcccggcatcgggttcatatactcaaagtcgaagcgcagctggttggtcgcgcccagtttcagcgccggaatagagacatctgttttgccatccagcaaaccttgtaataccggaatccgcagcagcaggcggttcgcctcctgtttgctgctcaggttgaaggattgcaggaactggttattcaggctgatatccatccggctactgtctttcaccggcggcatggtgtagcggtaattaatatccatatcaatgccggtactgcgcatcaggtagagatccggcggcaggtttaggctaacgttaatcgctgctggctcaagaccgctggattgtaactgttcttcataggttttcagttcgccaaatgtgaccggacgatcggtacgtacccagttcggcgcatcgtacggcttacgcggtagcagcggtttcacttcattcactaccacgctttcaccacggaacagaatgttaccctgagcgatacctttcgctgcctgcaacaggtctttgtcgtcacgaccaaacaccaccagcagtttgacgtaaggattctgcggatggttaatcatctcaatcaccggggcttttaccgccggatgatcgcgcaggaagtccggccgtttgtcgttggttgcaaagacaatggcattgcgatccggcagttggttatagagtaccgggaagttctgcccacgccagccagaacggctaccaaaccagctggcgacaatggcagaggcttgttgcagcccaacatccggcgcacccgcaaagaccatcggcaaggtgttggtgcggttatcgctcgggtcaaagaatggcaccgggaagtgactcaggtcattcttcacattcagggtctgataggtcagatccagtccactgctccgcccaacatccagccaaagcgtggtgctggccggtttttcgcacacgtcctgataatggccgacaaactccagccgtacacggttgaagtcgctaataaacagtgggttaatgggcatttgcgccagcgtttttttacccaactgttctttggtcactggcagcacgcccatcagttcatcattgagataaacctttaactggctctggacaggcagtaagcttgggcttggggtgtattcgaggttgagcatcgccttcgtcaccacttcatcgctgcgcataccaaactcaatgctgccgttcgggttaatgccacgtagcaccatgctgcccggcggcggtgcaatttgcgcaaaggtcagcttcacatcacggctaggaccgttctgcgccacgactggcgcatcagcgccctgcacgcccggcatcacttgccccacctgcggattttgttccgtctgggcggctacagctggctcagcattgatcagtggttgcgttgctggcgtcgcctgcgtcatgaaagaggggaacgcactcatccccatagccactgcacaaatccagaatagttttcttttcatcgcgttatcatcattgttgagccaaagcctgatcgcttggttgtgccgtttcgctccgctccgggcggcgcggaataaagcttacaacccaggaaaccagagaagtcagcacacggaatatgcccttcacgctagaaggcgcaaactccgccagatggcggtagccacggaagccgagcttcagaatatccagcagactttccagcggcttatcttccgggtagctgtcctgccagagcgcccatgtatccgcacgggcaaacgtacactgcacaaaatcgatatgttgctgggtggtgagcggcattaatttcagcccaacttcattacccatcacgcgcgccacctgggtcgggaagacgtattcctgctgaccgcgtttaagcaacagattcactttctgcccttccagaatctgcgcctgaccgttgatcttgatccccaaaccaccgtcggagaaatcctgaacggtacagctgaagaggtgaccatcttcgcgggcaattgccgcgggcatcgtcatctccacgcggtggcttcggcgtacctgtttgctttctacgcttaccgcaactgcgccgccaagaacaatcaggttgtagaacacccacaccatactgacgaccacggtgagcatctcggttggcgggccatagaagtagcgccagatgcctaccgcaacgcccaccaggttgagcaggacaaggaagatgtagggccggctgatcacccagtcgacgtactcttcttccaccagtccacctttggcggtgacgttaaatttgcctttgtgcgggttaatcagcgccaccagcgtcggtggtgcgatataccacgccagcaccgtttcgtagatttcactccagaaagagtggcgatatttgccctggatcttggagttggtcaggctggcatggatcatatgcggcagcacgaatagggcgatcatcaacgctggcgcatagatgatgtaggcatgaagcagcaggaacgccagcggcgcagtcaggaagatcagccgtggaatgccgctcaagaagtggaacatggcgttgacgtaacatagccgctgagcaaacttcagccctttaccggtgagcgggttatcgagacggaagatttgtaccatcccgcgcgcccagcgaatacgctgaccgatatgcgcgctcagactttcggtcgccagccccgccgcctgcggaatacgcatatacgcggaggtatagccacgacggtgcaaccgcagagaagtatgcgcatcttcagtcacggtttcgacagcaatgccgccaatttcatccagcggcttacgacgaatcaccgcacaggaaccgcagaagaaagtggcgtcccacatatcgttgccatcctgcaccagaccatagaacagcgtgccttcgttcggcgttttacggaaacgccccaggttgcgttcaaacgggtccggactgaagaagtggtgcggcgtctgcatcatcgccagctgtttttctttcaggaaccagcccatggtcatttgcaagaagcttcgcgttggtacgtggtcgcagtcgaaaatgctcacgaactcgcctttggcatatttcagcgcattgttgatgttgcctgctttcgcatgttcatgagtggtgcgggcgatatatttcacccccacgttttgcgcaaactggcgaaactcttccctgccgccgtcatcaaggatccagatattcagcttatctttcggccagtcgatacccaggctggcgtaaatggtatttttcaccacgttgagatcttcgttgtaagtcgggacaaagatatccacgctcggccacaggctcatatctttcggcaatggcaccggctgacgattcagcggccatactacctggaagtagccgagcaccagcacaatccacgcgtacgtttcagcgaagagcagaataagcccgcacaccaggctgaccggatcgtcccagttcagcgtagaggtgtaacgccaccagatataacggcaagaaacggtcaggctcagcacaatcaacattagcgcgctgaagcgccccggcatccgccgtacgatcagcgctaccccccacagcagcatcaggaagataaactgcgccagcgggttaaacggctgagtaacgcagattaacgccagaatcaggctgaaggtgacgatgataccgaggatcaaccgccgcgccccggcactcaaatgaccgagctcttttttctcatccagatgctgtgttttatggctaacgcgctcaggcagctcgttcatccattgatggtaacgtccacgaatattttgcagaccactaaatgcccgcctgcgcggtttcggcgtttctttgcggcttgcaccgatcaataaccagcatgtttgaatgagataacggaccgggtccagcggacgcggacggctggcgttgatatgcggatacaggtttttatgttctgcgcgaatacgctgccagcgcgggtgctccagcggaataaaaatccaggccaggatcatccagaaacagccgagcgtcgcgctgaaagcgctcgcaccgtgacgacgataatcgcgataacgcccgataagccgcgcgttgaccggcgggataagcaaccaccgggtcaggatactcatgatgcactcccgactggcgtttacatcaacttgcactcccgactggcgttttcagcccggagtagttcaacaggcaccagttcgccagcgtcagtatctcttcagccgccagcgcatcactgcgatattcacctactggttgcttagccgccaggcattcagccatcgcttcatcacgatgaatgagcatcggcagtaatcggcgctggctttgcaaccaaagctggtaaatatcgtcctgaacctgactgccaatacggaagtcattaatcaaaatatgtgcgccatccggcagcgcttgctgatgcagtcggatatggcagttggcatccacattgacgattgccaggctgtgatcgcacaaactcagcagctggtgggttatctggctggcatcacgcggtaagtcgattaaaatccactggtaacgcccgctggcttttagttgctgtaagccggagcaaatatcgctcagccgggtttgccagtgctgtggattttcttgttcttcaatggataactgaccaaaaggcagcaaatcgagctggctggtgtagcgcaacccagcgtcacgccagtcctggccatccagcatcgctctggcccagccctgacggtgggtaaaatcaacattaaaactcaggcgcaacaagttgtccgggcaggcatcgaccaccaggacattttctcccaacatttgtaaactccaggctaatgcggcggtgatggttgttgtccccacgcctccccgcaccccctgctatcccagtacggccattcaccaatcccttacttttgttgcgcaaactctgccagcaacggccagcgttttaatgccgcggccaactgttcgcgttgggaaatatcggcataatcaatatcaggcagactaaatgcctgctttaacgccacaatatcattctggaagatatagcctatcgcgggatcaggcagagtatctggttcattgttattcattttgcttgatccctatgaaataaccgtaccgttcatgagacaattctaaccgtgagcatttcgccggtttattgtttacggcgagacgggaatttgctcactttttgactttccgttacgcaacagaaaaagttaaaaacgaaaagactaaaatcacacgtcttgtgaccttctaaattgattcacatgctaaatctgataagttttaatttcaatggtaggtttatttcttagctttcgctagtaaactgataatcagacaaaatggtgacatgagggacattgtggaccctgtattctctatcggtatcagtagtttatgggatgagctgcgacatatgccagcaggcggcgtctggtggtttaacgtcgatcgccatgaagatgctatcagtctggcgaatcaaacaattgcatcccaggctgaaaccgcacacgtcgcggtcattagcatggacagcgatccggcgaaaatctttcaattagatgattctcaagggccggaaaaaataaaattatttagtatgctaaatcatgaaaaaggtctatactatttgacccgtgatttgcagtgttctattgatccccataattacctttttattcttgtttgcgcaaataacgcatggcaaaacattcctgccgagcggcttcgcagttggttggataaaatgaataaatggagcaggttaaaccattgtagccttttggtaattaatcccggaaataataacgataaacaatttagtttgttgcttgaggaataccgtagtctttttggtcttgccagtttgcgttttcagggtgaccaacatttgctggatattgccttctggtgcaacgaaaaaggggtcagcgcccgtcagcagcttagcgttcagcaacaaaatggtatctggacattagttcaaagcgaagaggcggagatccaaccacgcagcgacgaaaaacgcattctgagtaatgttgctgtactggaaggtgcgccgccgctaagcgaacactggcaactgttcaacaataacgaagtcctgttcaatgaagcccgtaccgctcaggcggcgacggtggtcttttctttacagcaaaatgcgcaaatcgagccactggcccgcagcattcataccctgcgtcgccagcgcggtagtgcgatgaaaatcctcgtgcgggaaaataccgctagcctgcgcgccaccgatgaacgtttgttattggcctgcggtgcaaatatggttattccgtggaatgcgccactctcccgttgtctgacgatgatcgaaagcgtgcaagggcagaagtttagtcgctatgtgccggaagatatcactaccttgctgagtatgacccagccgctcaaactgcgtggtttccagaagtgggatgtgttctgtaatgccgtcaacaacatgatgaataaccctctattacctgcccacggtaaaggcgttctggttgccctacgtccggtaccgggtatccgcgttgaacaagccctgacgctgtgtcgccctaaccgtaccggcgatatcatgaccattggcggtaatcggctggtgctgtttctcagtttctgtcggattaacgatctggataccgcgttgaatcatattttcccattgcctactggcgacattttcagtaaccgtatggtctggtttgaagatgatcaaatcagtgccgagctggtgcagatgcgcttgcttgccccagaacaatggggcatgccgctgcctttaacgcaaagttctaaaccggtcatcaatgccgagcacgatggtcgccactggcgacgaataccagaacccatgcgactgttagatgatgctgtggagcgcagtagttgatataagatgctgtggagcgctcatcatgatgaccatcagcgatatcattgaaattattgtcgtttgcgcactgatatttttcccgctgggctatctggcgcggcactctttgcgacgcattcgcgacaccttacgtttgttctttgctaaacctcgttatgttaaaccggccgggacgttacgccgcacggaaaaagccagggcaaccaaaaaatgactcaatttacgcaaaataccgccatgccttcttccctctggcaatactggcgcggcctttccggctggaacttctattttctggttaagttcggcctgttgtgggcgggatatcttaacttccatccgctcctcaatttggtgtttgccgcgtttctgctgatgccccttccgcgctacagcctgcatcgcttgcgccactggattgccctgccgatcggctttgctttgttctggcatgacacctggttgcctggcccggaaagcataatgagccagggtagccaggtggcggggttcagtaccgattatttaatcgaccttgtcacacgctttattaactggcagatgattggggccatttttgttttattagtggcctggttattcctgagtcaatggattcgcattaccgtttttgtggttgccatactgctatggctgaacgtacttaccctggcgggaccaagtttctccttgtggccagccggacaaccgacgaccactgtaacaacgacgggtggtaacgcagcggcaaccgttgcggcgacgggtggcgcaccggtagtgggtgatatgcccgcacaaactgcaccgccaacaacggcgaaccttaacgcctggctgaataatttctataacgcggaggcgaaacgtaaaagcaccttcccgtctagcctgcccgctgatgctcagccatttgaactactggtgattaacatctgtagcctttcctggagcgatatagaagccgccgggttgatgagccatccactgtggagccatttcgatattgagttcaagaactttaactccgccacctcctacagtggcccggcggcgatccgtttactgcgcgccagctgcgggcagactagccacactaatctgtatcaaccggcaaataacgactgctatctgtttgataaccttagcaaactgggctttacccagcacctgatgatgggacataacggccagttcggcggttttttgaaagaagttcgcgaaaatggcggcatgcagagcgaattgatggatcaaacaaatctgccggttattttgctgggctttgatggtagcccggtttatgacgataccgctgtgcttaaccgctggctggacgttaccgaaaaagataaaaacagccgtagtgccacgttctacaacacgcttccactgcatgacggcaaccattatccgggggtcagcaaaacagcggattacaaagcgcgggcgcagaaattctttgatgaactggacgccttctttactgaacttgagaaaagcggtcgtaaagtgatggtggtcgtggtgccggaacacggcggcgcgctgaagggcgacagaatgcaggtatctggcctacgtgatatccctagcccgtctatcaccgacgtccccgttggggtgaaattcttcggcatgaaggcaccgcatcagggggcaccgattgtcatcgaacaaccgagcagcttcctggctatctccgatctggtggttcgcgttctcgatggcaagattttcaccgaagacaatgttgactggaaaaaactcaccagtgggttgccacaaacagcaccggtctccgagaacagtaatgcagtagttattcaataccaggataaaccgtacgttcgcctgaacggcggcgactgggtgccttacccgcagtaagaacgaaaaaggccgcagagtttcccccctgcggcctggtccgggcgcaaattgccattacggcagcctgacgcccgcatgacacgttacttccgcttgttcagccagttcacgatcatactggcaagaatgccagcaatgaccggagccgctaaatcatgccagaaggccatgcccagctctgcgaacgtcatatagccgcctgtgttgtaatgacaacgtttcgcggctattcttgagtggtctagagtcaagattagcccccgtggtgttgtcaggtgcatacctgcaacgtgcgggggttttctctctccagcaaccaatgccaccagggataaagcccccgcaacattgcgcctcaccggaacctttccggcttgccgctgattctacgattgctttttactgtcagcacccggcaatcttcctcattgcgcgatgccttccagcttaatttctttatttgcaatagttgcagttcatatccgggctgactccagactggtagtgaaatgcgcaattttgtagaattgcgcctcctcgcgacctccccagtgaatctgttgcctcattttttacatactgcgtattcgacttctccacctgttgcgcaagagaaactgggtttattcatttttgcgaggccgacttctttctggacaggactttatgcagcacaacacactaagcaaacacaatcagaaattgccgtttacacgctacgacttcggctgggttttattatgcataggcatggcgattggtgccggaaccgtgctgatgccagtacaaattggcttgaagggaatttgggtatttattaccgcagcgatcattgcttatcctgccacctgggtagtgcaggacatttatttaaaaaccctttctgaaagcgattcctgtaatgactacaccgatattatcagtcattacctggggaagaactggggaattttcctcggggttatctactttttgatgattatccacgggatttttatctactctctctccgtggttttcgacagcgccagctacctgaaaaccttcggtttaaccgatgccgatcttagtcaatctctactttataaagtcgctattttcgccgtactggtggcgattgcgtctggtggtgaacgattactgtttaagatttccgggccaatggtggtggtcaaagtagggattattgtcgtgttcggttttgcgatgatcccgcactggaatttcgccaatataaccgccttcccgcaagcctccgtctttttccgcgatgtcttgcttaccattccattttgcttcttttctgcagtatttattcaggtacttaacccaatgaatattgcctatcgtaaacgggaagcggataaagtactggcaacccggctcgcgctgcgtacccaccgaattagttatatcacgctcatcgcggtgatcctgttttttgcctttagctttaccttcagtattagccacgaagaagccgtttctgcctttgaacaaaatatcagtgcactggcgctggccgcgcaggtgatccctgggcatatcattcatatcacctctacggtgcttaatatctttgccgtactgaccgcattctttggcatttatctcggtttccacgaggccattaaaggcattattctcaatctgttaagccgaattattgataccaagaaaattaacagtcgcgtgctgactctggcgatctgcgcttttatcgtcattacgttgacgatttgggttagctttcgtgtaagcgtgctggtgttctttcagttgggaagcccgttatatggtattgtgagctgcctcattccgtttttcctgatctataaagtcgcacaactggaaaaacttcgcggatttaaagcctggctgattctgctgtacggcattttgctatgcttgagcccactgttgaagctgattgagtaaaccggagcgcatggccccggttttgtgagttaacgctgcggattttcatcctgatcaacagcaaaacaagctaccagttgaccgccgtagtcttttagctgcggctgcaactgggtgcaggggccgaagcgccgacgacagcgggcgttgaaggcgcaacccggcggtggattcagtgggcttggtagttcaccgctgagcttgatgcgctcgcggcgatcgtccgggttcaggcgcggcgtcgcggaaagtagcgcctgagtgtacggatggcgcgggttattgaagatttggtctttcgttcccttctccacgcagcggcccaggtacatcaccatcacttcatcagcaatgtgctccaccacgctcaggtcgtgggagataaagacataagacagccccaactcctgctgcaaatccatcatcagattcagcacctgcgcgcgcacactaacatccagcgcggaaaccggttcatcggcaatcaccacatccgggtcgagcatcagaccacgggcgatggcgatacgctgacgctgaccgccggagaacatatgcggatagcggtcatagtgctcggttttcaggccgactttcgccatcatgctcagggctttttcccgacgctgttctttgcttaagctggtgttgatcagcagcggctcttcaagaatttgcccgacttttttacgcggattcaggctaccgtaagggttctggaagacgatctggattttctgccgacgcagcttctgcgcctgcggatcgtgcttaagcagatcctgcccctggtaatacagctcgccaccggtgggcatttcaatcatcgtcagcaaccgaccgagggtgcttttaccgcagccagattcgcccactactgccagcgttttgccacgttcaaggttaaagctaacgccatccagcgctttaaccagacgttccggcgcgaacatgcctttcttcaccggataatgttttttcaggtcgatagcctgcaacagcggttgttgcagggtggcctcttgcgtactcatagtgtcggcctcccggcatcatcaagtgggtaatggcatttggactgacgcccgtcagcgagcatattcagcgccggttcttcagcgcgacatctgtcagtggcataggggcagcgcgggttaagcaggcagccgttcgggcggtcgtacttgccgggaacgacacctggcaagctcgccagacgttctttgtcctgagcaaattctggcagcgcacgcagcaatgcctgagtatacgggtgacgcggcgcatggaagatggcgtgcgcatcaccggtttccaccacctggcctgcatacatcacgatgattttatgtgccgcttccgccaccagcgccaggtcatgggtaattaacaccagcgccatgttctctttctgctgtagctccagcagtagttcgatgatttgcgcctgaatggtcacgtccagcgcggtggtcggttcatcggcaatcagcagttttggccgacaggcaatcgccatggcgatcatcacgcgctggctcatgccgccggaaagctgatgcgggtaaacatccagacggcttgccggatcgggaataccgacctgattcagcaggtcaatcgctcgctgacggcgggtacttttgttgccgccctgatgcaccttaatcgcttccataatctggaaacccacggtgtagcacgggttaaggctggtcatcgggtcctggaagatcatcgccacttcggcacccaccaggttgcggcgctctttttcactgatacgctgcaaatcctggccgttaaactccagtttttctgccattacgcggcccggataatcaatcagccccataatcgccagactactgacgctcttaccggagccggactcacccacaatcccgaccacttcgccctgttttacgctgtagctgatgcggtctacggcgcggaacggcgcgctttcgtcgccgaaatgcacgcttaatttatctacatttaataacgccatctcgaacctcttactgcttcagtttgggatcgagcgcgtcacgcagaccgtcacccatcaggttaaatgccagcaccgtcagcaggatcgccagacccgggaaggtcacgacccaccaggcgctttgcgcgaactgcaacacgtcggagagcatggtgccccactcaggcgttggcggctgtgcccccatgccgaggaaaccaagagcagccatatcgagaatggcgttagagaaaccgaggctcgcctgaacaatcagcggcgcaaggcagttcgggaagatgttaataaacatctgacgcatcgccccggcacccgccacgcgagacgcggtgacgtaatcgcggttaacttccaccagcacggcggcgcgggttaagcgcacatagtgcggcaaggcaacgaaggtcagtgccagcgcggcgttaccaatgctcgggccgaaaattgccaccagcaccagcgccagcagcagacttggcagcgccagcatgatatcgaccacgcgcataatgatgttatcgaccaggccgccaaagtaaccggcgatcaggccgagaataacgcccataatcaggcttaacacaactaccagacagccaaccagcaggctcaggcgcgcaccgtacatcaggcggctcagcacatcacggcctacgtcatcggtgcccagcaagtgcgccatgctgccgccttcctgccaggctggcggggcgagcagtgcatcgcggaactgttccgccgggttatagggtgcaatccagttggcaaagatcgcgatgaacagcacgatgacgacgtaaaccagcccgacgaccgcgcctttgttgcgtttaaaatagtgccagaactcctgtaacggggtcatcggcaccggtgcgctaatcactttattttcagtaacctgactcatgatgtccccttacttcttatgacgaatacgcgggttcaccacgccgtacagcagatcgaccagcaagttgacgaggataatcatcgtcgccaccagcaatacgccgccctgcactaccggatagtcgcggcgttgcagtgcgtcaatcaaccagcgtcccagaccgggccagctgaagatggtttcggtcagaatcgcccccgccagcaatgttcccacctgcaggccgataacggtcaccaccggcagcatcgcgttacgcagcgcatggacgataatcacccgcatgcgggttagccctttggcgcgcgcggtgcggatgtaatcctcgcccagcacttccagcatgctggagcgtgtcatacgcacaatgaccgccagcggaatagtacccagcacaatggcaggcaagatcatatgggcgacggcatcgataaagttgccgtcttcaccccagatggcggtgtcgattagcataaaaccggttaacggattggagtcatcgaggaacaccatatcgctcacgcgaccggagacgggcgtcaggttccagtgcacgctaaccagcatgatcagcatcatgccccaccagaagataggcatactataacctgtcagcgccaggccaaccgctgtgtgatcgaaaatggaaccgcgtttaaccgcagccagcacgccgaccggaataccgactgccgtagcaaaaatcatcgcgcagacgccaagttccagcgtggcctggaagcgcggcacgaactcttcccaaaccgggatgcggcttttcatactaatgcctagatcgccatgcataacgccccaaatgtaatggagatactgctgccacatcggtttatctaagccgagttcagccagcagctgcgcgtgacgctctggggagatcccacgttcgcccgccatgatcatcaccggatcgcccgggatcatgtggacaaaggcaaatgtgagaagggtaataccgataaacgtggggatgacgagtcccaaacgtcggagaataaactgcaacataacccggattctctatagtgacccgcagcctggaactgcgtgtctgtattgctcacaaatcaattcccgcccttatcggacagggaatgaagtattgctgccggatggcgctgcacgcagaggcacagcgccaccgggtatacagattgttgacaaagtgcgctttgtttatgccggatgcggcgttaacgccttatccggcctacaaaatcgtgcaaattcaatacattgcagaattttcgtaggcctgataagcggagcgcatcaggcatttttgcctttgccatcagtcttgtatggcttttaattattcgatagagacgttttcgaagtgatgtttgcctaatggatcaaccacatagcctttaacttctttacgtaccggttcaaacacggtggagtgagcgatgatcagtgccggagcctgatcgtgcatcaccacctgcgcttgtttgtacagttcaacgcgtttattgtggtcgtcggtagcacgcgccggttgaatcagatcttcaaacggtttgtagcaccatttactgtagttggagccttgttcagaggcggcgcagctgaacagggtggcgaagaagttatccggatccccgttatcgccagtccagcccatcattaccgtctggtgctcgccatctttcgcacgcttgaggtactcaccccattcgtaggtgacaattttggcctgcacgccgactttcgcccagtctgcctgaatcatctccgccatgcggcgagcgttcgggttatacggacgttgtaccggcatcgcccacaggtcgatggagaaacctttttccagacccgcttctttcagcaaggctttcgctttttcaggatcgtaggtgtagtcctgaacgtcgtcgttatagccccacatggttggcgggatcaggtttttcgcacttacgcccgcgccctgataaaccgctttgatgatcgcgtctttgttcaccgcgtaggtcagagcctggcgaactttcacgtcatcgagtggttttttctgcacgttatagctgagataaccgacgttcagccccggcatttccatcagattgatggatttatcctgcttcatgcgagcgatatctgccgggttcgggtacggcatcacctggcattcattcttctgcaatttcgcgtaacgcacggaagcgtcaggggtaatagagaaaaccagcgtatcgatctgcggtttggtgccccagtagccatcaaacgctttgtagcggatacgggaatctttttgatactgctgtaactggaacggaccggttccgattgggttgaggtccagtttttccggtgtaccggctttcatcatcgcatcagcatattctttactcagaatagaggcgaagtccattgccaggtcagcgaggaacggcgcttccgggcgagtcagcacaaactgaacggtgttgtcgtccacctttttcacttcactgatcagctctggcaagcccatgccttcgaagtattcgtagctgccgccagaaactttatggtacgggttttgcgcgtttttctgacgatcgaagctgaacaccacatcatcggcgttcagttcacgcgtcggtttgaattctttattgtcgtgccacttcacacctttacgcagatggaaggtataggttttaccgtcttcgctgacttcccacttttcagcgaggcccgggatcacttcggtggtgccgattttaaattcaaccagacggttataaagcgggacggaagaggcgtcataggtggtgccggaggtaaacagctgcgggttaaacccttccggagatccttcactgcaataaaccagagttttagcctgaacacttgctgcgacggtcatagccaccaggctgagaccaagcttcagcatcccactctttttcaaggaaatacgcattattctgctccaattgtgatgtttgttgttttaaccctttgcagtgggttgtcgctgcctgaccttttttgttttttgcccggtcgggtcaacgttatgaggtggggatgccgtactaattaacatcagtgtaacagtgcggatcctccataaaatgcccctcgtgacctacaatctgtcaacagaatgtgaaaacgtcaatacagccaaccgggatttacaccaacggtgagaatccacacacaaagattaaaaaaacttcaaacagctatttgcagcagagaaatttgtgctactccaacatgaccagaacaatcagcttaatatttagcaacatttggtgattaagttttatgcatttaatgaaaaaaatctgaggaaaaggtggatatctgagcgattaataccatgaacgctaaaacgcacagcggaaaatgccagggccagccataagtaacgcaaaaaaagatttaagcaaatataaaaaaagacaatggtttctgtcacaaatccgttaatggatagtgagatatggggcgcaaatttggcagggaaatgtgtgtcgtgtaggtcgaataaggcggtcgcgccgcatccgacaatggccggcacatttgcctgatgcgacgctgacgcgtcttatcaggcctacgtcgagtcgaacctccctgcccccggaggttctcatcctcatgagctgcagatgcaaaaaagcctgctcgttgagcaggcttttcgaatttggtcggtgatagaggattactcgccacttcgtggctcgccctgcgggccgttgctggcgcaacgttctctcgcttcgctcgagtcgaacctccctgcccccggaggttctcatcctcatgagctgcagatgcaaaaaagcctgctcgttgagcaggcttttcgaatttggtcggtgatagaggattcgaacctccgaccccttcgtcccgaacgaagtgcgctaccaggctgcgccaatcaccgaatgcggggcgcatcttactgcgcagatacgccctcgtcaatcccttaatagcaaaatgccttttgatcggcgagaaagtcagcaggccgcttagttagccgctgcctcttttgcctgcgggatgtgacaccagttgttgttttcgttaattccaccatccggactagtatagccaagacaacccatgatggtatcgtacagctctacgtgacggcgtggcactttcatgtcggcttcttttttcagctgcgcaaacgcctgcgcattggccggattttccagatatttatcactcatccagaccatcatcggtacgcggaactgctccggcggtgccagttcacgcggcgtgccgtgcaggtgctcgcgttcattaatactctcaccgtggtcagctgcgtagaacacaatcgctttcttatcgcgaacctgatcaatcacgctggagataaagtgatccacataggtcacgctgttgtcataggagttgatcatctgcgctttggtacagccgctatcaacaccaatacattccggcttccactgcgcgaagctacgcggataacgctgggtgtagttaaaatggctacctttggtatgcagaatgatcagatgcttaccatccgggttgcgccctaggctttgctgcatttcgtctaccagcaacatatcatctaccggcttgccacgattacgtggctccgcaccaatctgctcacgataagcaatgttgtccgccatcgtgttgctgtagaaccacatttcgctctgcatagcgtagaggtcagaactgaatcctaactgcttcagaaccgcgaaaatgttctgttcttttaatgtgcgctgcggattatcttccgcgcccccctgacgtacaaacatgcaacgcagactgagtttggttgcggtatcacaggagtaaccacggaacgccgccagatttttctcctgggccagtttcggcgtggtattacgctcatagccgaaaatacccatatggtcccaacgcgtggtttcaccgatgataaacacgacataagtgtcatcaacgttttgcggtgcctgataagtgaatttcttcgccggattaagcaaactattattatcggaagattcatcgacccgcgcccaggcatacagccccaacgcagaaagccagttacttggcagataagagttcgctacgacaccgccataactcggcaaatcaacgccggtcgccctctccactttcttctgctggatatccagcaaacgaatcggtgcccaaaccataatacccgccagtacgacgaccgccaggctgcgaatacgctgccctggggttcgcagttgtcggagcaaggtgtagcgacagcggttattccagataaggataagaggcaatgcactaacggcgattaaccagagaataaagttcagaccaacaacttctttactcaggtcgatatcggtggtcatgacggaagcgatgatgccataaccaatgaccacattaaggaaggtcatgtaatagctggcacctgcggaaaagagcaccaccaggcttgccagaatacgccagctgcggcggccaaacaggctaagaagacgtagtaaaaagaaggtcaccagtacggtggcggccagttcaacaacagcagaaatgcctttccagacggtaaaatcgtgcgcatagctgccgaagcggcggtaaaaaaccgcgccattcataaaaaggccaatatagattgcaagcaaaaagctcagcttctgctgtgtaatgcttttgatgtatctcatgcaaacaaaccctggacaaacaggtgataacaccctgcttagtggcttttcaggcccggcagggaaaaagtgcggaggtagtcagataagtaaaatctacacgcgcgaataagtagaccacagcaaagggaaaaagtgtggggaaagagtgtgcatgaagcacaaatttacaaaaatgcaagtttgaaaagagactttagcgttacaaaaagcagtaaaaagggccagttaattggcccaaattttacgagtcattgtttatacatttcgttgatgcgtttgatgcacacggaagctgaagcccagtagctcgcggctgagcattaaagggagccatgcgcctcacgcaacattttctgctctggctgacgaatcgtcgtagaaagcgccaaactcagaatcagcagggcgaaaatcacgtagaaggtcacatagaagccgccaaacagactggcgataatgctaccacaaatgctaccgataccgaaaccgagataaatcacaccgtagtttttcgccaggttattgaggccaaagaactcactgaccagactcggaaagacggtaatagtgccgccaaagttaaatgccacgcaggcaatcgctgcaaagaacgtcactgcattcaatggtgcaaacagcagggccgccatacccaccaggcttatcacctgaccaatggtaataacacggatacgggcgattttgtcagacagaatacccagcaccagacgaccactaaggttggcgatggaaataacagtgactgcattggctgcggaaaccacatcaaggtgtgccagactttgggcgatatctttcgctaccccaatcacgtacaggccgctcatgcaggcggtcaggaacattaccgctaacatccagtactgcggtttacgcatgctctctgccagcgtgtaatctttctccaccacaccattgctggttttcacttcctgttttggtgcgtctttcattaacgttgcgccgaaaacaatcatcaacagcgcaatcgctccccaaatcacaaaggttttttccagaccgaccgtttccagcagctgcgtgtcgataaatttgaaacccaggctacccagaccataagaaccgatagcgaacgcggagatcagacctttacgctccgggaaccacttcacacagttagagagcgtcagcagataacccgcgccatctgccagtcccaccagcacaccggcgcttaaccacagcatcatcaggttgtcagaatgcgctgtcaggaagaagcctaatcccagcaaaatgccggaagccatggtgacgcgtttaacgccaaaacgttcctgtaatttgcccgcaacagaagagctaattgccagccccagacttaacaagccgaaagagaaagcgacctggcttaccggcgcatccagcttggcggaaagcgcgccattaaacaggctccaggtataaacgctccccagcgcaaactgggtaatgatagtaccgatgagtgtcagccagcgggtacgctgataattactaggtgtcatggcagtattcctgcagtaataaaaaggaaaaatctctgccgacaaccataacgaagtgcactttatgcctggggaaaaacggcatgaaatgccatcagaacggaatgaaatgccttagttcaggaatgaatgacgcgacaattattcaccaaatttattatttggtaagttagcacccactatcgccacaactattgttatttaatggtttcaattgtgactgttacgttaaaatctggcgctaacccccatcgtatacagatagtcgctattattagtggtattttctgcctgagttagcgcggcataggcggcaatattttgattgagcaacatatcagcgcctacggtgacatccagccagttgccgttctggtttgtcgccgtcatccggctcaggccactttgcgccttccagatattctcgccaaattgctggttatagctgatttgcgcccagggtcggagatcgccaagccgggagtcaacacgccagcctaaggtactcacgctggcatgccataacggatcggtcagcgtggtagtactgtcgccaaactcgttatacatgctggtggttgtgccatcgtaatgtaatgccgcgaccgggccggttgtaacctgttcatataaaggaaaattccagcccatactcatactgctggtcacatccacaggggtttcttccgccagattgacttccagtcccagcgccctttggctactttgaatacgttggctcaaaatatcgttgtaatcaggttgatgatcactatcccaggtgtaacgctctgtggaaagtccgggttgcgtatcaacgatatattcttgttgccaggcgtaagctgtgttgagaaaaaaggcactgattaccacgctcgccagcaggcttagctgccagcgaccaccgcttttttttatgatcattaacacgactccagggaagagccgaattcggcaatattattgtcattgtatgaaggatatcgggcatagtagccctgtattaaatattgactttttcaccgatgcgtcaagaaaagcggctgaaatttttacgatcgggtacatagcgagggaaagtatggaacgttgcggctgggtgagtcaggacccgctttatattgcctaccatgataatgagtggggcgtgcctgaaactgacagtaaaaaactgttcgaaatgatctgccttgaagggcagcaggctggattaagctggatcaccgtcctcaaaaaacgcgaaaactatcgcgcctgctttcatcagttcgatccggtgaaggtcgcagcaatgcaggaagaggatgtcgaaagactggtacaggacgccgggattatccgccatcgagggaaaattcaggcaattattggtaatgcgcgggcgtacctgcaaatggaacagaacggcgaaccgtttgtcgactttgtctggagctttgtaaatcatcagccacaggtgacacaagccacaacgttgagcgaaattcccacatctacgtccgcctccgacgccctatctaaggcactgaaaaaacgtggttttaagtttgtcggcaccacaatctgttactcctttatgcaggcatgtgggctggtgaatgatcatgtggttggctgctgttgctatccgggaaataaaccatgattcgggaagcgcaacgtagtgaactccccgcgatcctcgaactgtggctggaaagtacaacctgggggcatccctttataaaagcgaattactggcgtgactgcattccgctggtgcgggatgcctatcttgccaacgcgcaaaactgggtctgggaagaagacggtaagcttctcggttttgtcagcattatggaaggccgatttctggcagcgatgtttgtcgcaccgaaggccgtcaggcgcggtattggtaaggcgctgatgcagtatgtgcagcagcgccatccccacctgatgctggaggtttatcaaaaaaatcaaccggcgataaatttttaccaggcacagggttttcacattgtcgattgcgcatggcaggatgaaacccaactacccacatggattatgagctggccggtggttcaaacgctgtaattaactgctggccggtggttcaaacgctgtaagtgtcagttccggaccgttgtatttttccagccatgccagcgccgtattacccgcacagccattccccagccggctgctggggagatctttggtcagcacgttcactgcgccgtttttacaaataccgtcagcggttaaatccagatccggccatgccccttcgtgaatgcaaatcacgccaggtttaattccctcgctaatgaccgctccggcaagaatttgcccgcgtgcgttccacaaccgaacagtatcgccatcttgtatgccgcgctcctgggcatcgtcaggatgaatggtgacaggctcacgatttgccaccgcgtacaattcgcgcagagaactgtaattcagctggctgtgcaggcggtgcgccggatgggcagaaagtacctgcaactgttctggttcggcattgccctgccattcgtccggctccagccacattggatgcccagggcaatccgggtaaccgtaatcggcaatacgctgactgaagatttcaatcttgccgctggcggtttttaacggatgcgccagcggatcgcggcaaaaatcagcgaagcgaataaaccgctcgctgtccgggttttccggcatctcaattaactggttggcttgccagaactcagcaaatggcggcaattcaacctgctggcttgccccgcgctgtcgggcaacgttataaaacgtttccagccattgcagctcactttttccttccgtaaaacgtgcataaccgcccttctcccagcgttcacttaactcggcaaaaacatcaaaatcattacgcgcttcatagcgtggcggcaccacttgcttcatcggcaccagatgctgattactgtaatcaccggtcatggtgagatcattacgctcaaaagaggtagtcgcaggcagaacgatatccgcgtgttttgccgccgccgtccagaagcattcagagatcaccaccagctccggtttttgccaggcacggatcaggcgattggtatcctgatgatgagtaaagttggcaccgcccgcccaccagataaaacgaatatccgggaaatgtcggttcataccgttgtgttgatatgcgccaccagggttttccagtgcttcaacaatgcgggcaacagggattttatccaccgcatcgcagccacccggcaagctgccctgcatggaagagagcaccgcagaacgccgcgtggggttaccaccattggcaaaatggtaagaaagaccaaaaccgccgccgggtgtgccgatttgccccaacattgctgccagcgtgacgatcatccagtgtttttgctcaccaaactgttggcgctgcattccccagcctgccatcagcatggtggtattttggtggaaaatagccgccagctcgcggattttcgctgcgccaacaccacaaatctctgctgcccattcggcggttttcgctattccgtcactctcgcccagcaaataagaggcgaagacggcataacctgtggtgcaacgcgccagaaacgcttcgtcgtgccaaccattttccaccagcgtatgggcgatccccagcatcagcgcaacatcggtgcccatgtgcggtgccacccactccattttatcgccaaagaaatcgacggtttcgcttcgcattggatcaatgcagatcagctttttcccgctgtcacgcagtgcagaaaagtaagaaagcccctgctcatcggatgcattccacgcaattttcagcgtattgagtgggttagcactccacagcaccacgacatcgctatgttccagcaccagcggccaactggtctgctgttgataaacttcactaccacccacgacatacggcatgatcgcctgtgccgcgccggtgctataatcccccagatgcccggtataaccgcctgccagcgccatatagcgttgtaataatgtgctggccttatgcagcacgccgttactacgccagccgtaggaaccagcaaaaatgcttgccggaccataagcctcacgaatgcgtttatgttgttggtgaataagatccagcgcctcatcccaactcacgcgaacaaattcatcctgcccacgaatgccttgcgggttttccggactcgcaagaaagccttttcgcaccattggaaatcgtacccgcgtattgctgtgaacctggtcgcgaaccgcgctctgcaaggagttttccattcctgtggctaacgcgccacggctgctaaacacggtttcgccgtcggtttcaaccagcatgggcccccaatgggcggcagtcagaacggaatatcgtgaggatgagttggccaaaccgaagactcctgaaaggttagatgtattgagcagttaaatattacttacaaatttccgagtattcccaggaataatcttcatgttcacgcggcataatctcccgccacggaacccgtggcaaagaataaaaaggttattaaggattaacaatgaagaaacgtgtttatcttattgccgccgtagtgagtggcgctctggcggtatctggctgcacaactaacccttacaccggcgaacgcgaagcaggtaaatctgctatcggcgcaggtctgggctctctcgtgggcgcgggtattggtgcgctctcttctagcaagaaagatcgcggtaaaggcgcgctgattggcgcagcagcaggcgcagctctgggcggcggcgttggttattacatggatgtgcaggaagcgaagctgcgcgacaaaatgcgcggcactggtgttagcgtaacccgcagcggggataacattatcctcaatatgccgaacaatgtgaccttcgacagcagcagcgcgaccctgaaaccggcgggcgctaacaccctgaccggcgtggcaatggtactgaaagagtatccgaaaacggcggttaacgtgattggttataccgacagcacgggtggtcacgacctgaacatgcgtctctcccagcaacgtgcggattccgttgccagcgcgttgatcacccagggcgtggacgccagccgcatccgtactcagggccttggcccggctaacccaatcgccagcaacagcaccgcagaaggtaaggcgcaaaaccgccgtgtagaaattaccttaagcccgctgtaatccctttcatgccaggtgatgcagaaatcacctggcattcttcagttttccttcatcatatttcaggctaaggtgatcgccttatcagtgaatggagagaagcatgaagccgtccgttatcctctacaaagccttacctgatgatttactgcaacgcctgcaagagcatttcaccgttcaccaggtggcaaacctcagcccacaaaccgtcgaacaaaatgcagcaatttttgccgaagctgaaggtttactgggtagtaacgagaatgtaaatgccgcattgctggaaaaaatgccgaaactgcgtgccacaagtacgatctccgtcggctatgacaattttgatgtcgatgcgcttaccgcccgaaaaattctgctgatgcacacgccaaccgtattaacagaaaccgtcgccgatacgctgatggcgctggtgttgtctaccgctcgtcgggttgtggaggtagcagaacgggtaaaagcaggcgaatggaccgcgagcataggcccggactggtacggcactgacgttcaccataaaacactgggcattgtcgggatgggacggatcggcatggcgctggcacaacgtgcgcactttggcttcaacatgcccatcctctataacgcgcgccgccaccataaagaagcagaagaacgcttcaacgcccgctactgcgatttggatactctgttacaagagagtgatttcgtttgcctgatcctgccgttaactgatgagacgcatcatctgtttggcgcagaacaattcgccaaaatgaaatcctccgccattttcattaatgccggacgtggcccggtggttgacgaaaatgcactgatcgcagcattgcagaaaggcgaaattcacgctgccgggctggatgtcttcgaacaagagccactgtccgtagatagcccgttgctcagtatggccaacgtcgtcgcagtaccgcatattggatctgccacccatgagacgcgttatggcatggccgcctgtgccgtggataatttgattgatgcgttacaaggaaaggttgagaagaactgtgtgaatccgcacgtcgcggactaagccgcgactgcgtagagtaaagcccgataatcgctcgggcttttactctttattgggttgcagtaactgctgtagtccaggcctgattaaacgcctgatgctgtgccggtaatggcgcaatcagtttgttatattcacttgcctgctgactagtcgggaactggatgccatttgcgacaaagctcacctgagtaccttgctgagcaatgtagtctccaaccatcaccagttgttgcgtgaaagtttgtgccgccggaatcaacggttgcaatgcatcagctggcgtcgttaccactttggtgaatgcctgatcaaagaccggtttcaaatcatcgctctgttttagcgcagagtgcgcagcatcggcctgcaacttcgcattttgcagttgttgcgccagcacacccaggctaccgttcatttcacgcagcggaccgctttgcgtaacgtaatcctgcggtacgcgaattgcgttaacgctgtctacaaccgggcgcagaccggaatccatcgcctgattcacctgctgagaataaccatacagaatcgcgtaatcagagacaaaaggaccaaactgttttttctgatcggcagtcagggttggtagacgttcaccgctacgcatcactgtattctgcaggaagtcgataaacgctttacgctgatcgccttctttatcaaaacacccactcaggctaactaccattaataacgccgcaagaggcgcaaaccagcgagagcaggactttcctgtcgccattttcttactcctttcacccaaaaaaagcgcacaacgacacacgcgtgtctgacgtgacaaggatagtccaggacaggcttgcaggataccctttctacgtaatcttcctggtaaaatcatggagaaaatgaaacaaggttaatttgttgtttcattgttaaaaaatgatagtgccgttgccttttttgtagccagagatttacgccttcgcagaaggttagattttcgaaatctttacaaaacaggagtggtaagagatatatcggcatttatcagatcgttaggtggctataagtcacgctaaatgacaggctgaatcgaatcatagccagagcatgccctgacttcaccccgctgtgtctgcttttcccgactattcttaatgagcttcgatgcaattcacgatcccgcagtgtgatttgaggagttttcaatggaatataaagatccaatgcatgagctgttgagcagcctggaacagattgtttttaaagatgaaacgcagaaaattaccctgacgcacagaacaacgtcctgtaccgaaattgagcagttacgaaaagggacaggattaaaaatcgatgatttcgcccgggttttgggcgtaagtgtcgccatggtaaaggaatgggaatccagacgcgtgaagcctagtagtgccgaactaaaattgatgcgtttgattcaagccaacccggcattaagtaagcagttgatggaataaacttttatccactttattgctgtttacggtcctgatgacaggaccgttttccaaccgattaatcataaatatgaaaaataattgttgcatcacccgccaatgcgtggcttaatgcacatcaacggtttgacgtacagaccattaaagcagtgtagtaaggcaagtcccttcaagagttatcgttgatacccctcgtagtgcacattcctttaacgcttcaaaatctgtaaagcacgccatatcgccgaaaggcacacttaattattaaaggtaatacactatgtccggtaaaatgactggtatcgtaaaatggttcaacgctgacaaaggcttcggcttcatcactcctgacgatggctctaaagatgtgttcgtacacttctctgctatccagaacgatggttacaaatctctggacgaaggtcagaaagtgtccttcaccatcgaaagcggcgctaaaggcccggcagctggtaacgtaaccagcctgtaatctctgcttaaaagcacagaatctaagatccctgccatttggcggggatttttttatttgttttcaggaaataaataatcgatcgcgtaataaaatctattattatttttgtgaagaataaatttgggtgcaatgagaatgcgcaacgccgtaagtaaggcgggaataatttcccgccgaagactcttactctttcaatttgcaggctaaaaacgccgccagctcataactctcctgtttaatatgcaattcacacagtgaatctcttatcatccaggtgaaaaataaaagcgtgaaacaaatcactattaaagaaagtaatctatatttctgcgcattcccagcctcctgtgttgatttccaacgagtataactttgatttatagtcaggtggggcttttctctgtctgcctttcggtgaatacctgagacaaacagtctcaagcacccgtggctattctagcttaataagtttgtttcttctccttgatataatcctaaaaaaatctcataaaattaatatatgagataatctttattcagcagaagattattaaaggttgctgtattatttagcgataaaaaaagcctgccagatggcaggctatttaataacggcgttattattgcaacaggctaatatccgcaacgcgcaggaacagttcgcgcagtttctccagcatggtcagacggttgatacgcaattctttgtcatcaaccatgaccatcactttatcgaagaaagcatcaaccggttcacgcagctcagccagttcgaccagcgcatcctggtaacgaccttccgtaaagtacggctccagcttgtcacgtagcaccacaacctgcatcgccagtttaatttcttccggctctttcagggtagaggcattcacgcggtcgctcagcacttcgtcagatttcgccagaatgttagatacacgtttgttcgccgccgccagtgcagcagctgcatccagggtacggaaatggcttaccgctttcatacgggcatcgaaatcagccggacgagtcggacgacgcgccagtaccgcctggatggtgtcaacggtataaccttcgtcctgataccaggcgcggaagcgaccgagcataaagtcgataacatcatcaactacgttggcattagtcagcttatcgccatacagacgcaccgcttcttcggtcagcgtttgcagatcaaggttgaggttcttctcaacgataattcgcagcacgccaagcgcggcacgacgcagcgcaaacgggtctttgtcgcctttcggatgctgaccgataccgaagatacccgccagggtatccatcttgtcagcaatcgccagcgcacaagctactgggttggacggcaggtcatcaccagcaaaacgcggctgatactgctcattcagcgccaccgcgacatcttccgcttcgccatcgtgacgcgcatagtgcatccccataacgccctgggtgtcggtgaactcgaagaccatgttggtcatcaggtcgcacttagacagcagacccgcacgggtagcgtggttaacgtcagcgccaatctgttcagcaatccagccagccagcgcctggatgcggtcagttttgtcgcgcagcgtccccaactgttgctggaacaacacggtttgcaggcgcggcaggttatcttcaagacgttttttacggtcggtgttgaagaagaactcggcatccgccagacgcggacgaacgactttctcgttaccggagataatctgctgcggatctttgctttcgatgttggcaacgaagataaagttcggcagcagtttgccgtcgttcgcatacaccgggaagtatttctggtcacctttcatggtgtaaaccagcgcttcagccggcaccgcgaggaatttctcttcgaattttgcggtcagaacgaccggccactccaccaggctagccacttcttccagcaggctttcgcttaagtcagcgttaccgccaatcttacgcgctgcttcttcggcatcggctttaatcttcgccttacgttcttcgtaatcggcgatgactttcccacgctcacgcagaatttccggatactgatcggcgttatcgatggtgaattccggctcgcccataaagcggtggccgcgaatcacgcgatcggactgaatgcccagaatggttgccggaatgactttgtcgcccagcagcagggtcacggtgtgcaccggacgcacgaagtgcacgtcgcttgcgccccaacgcatcagtttcgggatcggcagtttcgccagagaagtcgcaaccatattcggcagcagtgcttcggtgctttcgcccttcacatgggcgcgatacagcagccattcgcctttatcggtagtcagacgctcagcctggtcaacggtaataccgcaaccacgcgcccaaccttctgccgctttgctcggtttgccttcagcgtcgaacgcctgggcaatcgccgggccgcgtttttcgatttcacgatccggttgcgcttccgccaggttagctactttcagcgccagacgacgcggagcagcaaaccattgaacggtgccgtgtgcgaggccagcgttatccagctccgcagtaaagttcgcagcaaaggactcagccaggctgcgcagtgcttttggtggcagctcttcagtgccgatttccaccagaaaagttttctcagacatagccgcctcttacttatctttgttgcacatcgggaagccgagggcttcacgggaagcgtagtatgcttctgccactgctttggtcagggtgcgaatgcgcagaatgtagcgctgacgctcggtgacggagatggctttacgcgcatccagcaggttgaagctgtgggcggctttcagaatacgctcgtaggctggcagcggcagcggattttccagcgccagcagctgctgcgcttctttctcgtactgctcgaagcaggtgaacaggaagtccacatccgcgtattcgaagttgtaagtggactgctccacttcgttctgatggaacacgtcgccgtaggtggttttacccagcgggccgtcgctccagaccaggtcgtaaacgctgtctacgccctgaatgtacatggccagacgttccagaccgtaggtgatctcgccggtaaccggtttacactccagaccaccaacctgctggaagtaagtgaactgcgtcacttccatgccgttcagccacacttcccagcccagtccccaggcacccagcgtcgggttttcccagttatcttccacgaaacggatgtcgtgaatagtcgggtccatgcccagctctttcagagaaccgaggtacagctcctgaatattgtccgggcttggcttaatgaccacctggaactgatagtagtgctgtaaacggttggggttttcgccgtagcgaccatcggtcgggcgacgagaaggctgaacataagcagccgccatcggttctggccccagctcgcgcagacaggtcattgggtgagaggttcccgcgccgacttccatgtccaatggttgaacaatggtgcagccctggcgagcccagtaatcctgtaaggtcaggatcaagccctggaaggtcctggtatcaaacttttgcatattatttcgtgctggatacgtgtggatttaaaggaagggatcagtatacccgctggatggaagatatacagtacgaaacgggaaaaagcagggcttaacgcatggaaagatgcaaaaaatggccatccgcgtcaaaagaacagacaaactgctctttacggaaggtataaccgcgcatttcatagcttccctggaactgttcgaaggcggtgacgtcgattttttgctcgccggtgttataacgttttgccgcctgatccttgcataacgcttccatattcaagctacgcagaggatcaacctttacccgttgtgctttctgcacgggactcggtatagaacaacccactagcaccataagcgccattgccggaaagaaagcgttcatcatcattaaattaccgtctggtttgcaggtgagtcttattatttatatcggtatagtggctgatatcttacgaatttccttaagcctctataagctgtagtgataaaactcagattattccagtgcgccaaccaaatgatttatcggtcagactttttttaaccagatacagagacacagatgcagcccaaaatttactggattgataacctgcgagggatagcgtgtttaatggtggtgatgattcacaccactacctggtatgtgaccaatgctcatagtgttagccccgtcacatgggatatcgccaatgttctgaattctgcctctcgtgtcagcgtgccgctatttttcatgatttccggctatctcttttttggcgaacgcagcgcccagccgcgccatttcttgcgtatcggcttatgtctgattttttatagcgcaatcgcactgctctacattgcgctgtttacctccatcaatatggagttagcgctgaaaaacctgctgcaaaagccagtgttttaccacttgtggtttttcttcgcgattgcggtgatttatctggttagtccgctgattcaggtgaagaacgtcggcggaaaaatgttgctggtgctaatggcggtgattggcattatcgctaacccaaacacagtgccgcagaaaattgacggttttgaatggctgccaattaacttatatatcaatggcgatactttttactacattctgtatggcatgttgggccgcgctatagggatgatggacacacagcataaagcactgagctgggtgagcgccgcgctgtttgcgacgggggtttttattatctctcgcgggacattatatgaattgcagtggcgcggaaattttgccgatacctggtatctttactgtgggccgatggtttttatctgcgcaatcgcgctattgactctggttaaaaacacgctggatacgcgtaccattcgcggacttggcttaatctcccgccatagtttgggtatatacggattccacgccttgattatccatgcgctgcgcacccggggaattgagcttaaaaattggccaatactggatattatttggatcttttgcgcgacgttggcagcgagtttgttactttctatgctggtacaacgaatcgacagaaacagattagtgagttaagtaaaagcccggtcacattggactgaccgggcttacgtgagttattcgctgtattcttcctgggtaacctgtgtttcttttggtgggtttattccggcatcacgaatatttttctgcaccgctactgcaccaaacaagcttaagaagaaagccagtccataaaaacctttttcgctgagtaataatgtcgcattccacagacctaccatcagtaatgcaacagagataataaagacagtcaggcaggtcatataataaatggaagtggtcggtatgccttcatacttgtcccgaacggtcttttgataagacgccgcagaaaacagtcctaataccagtacggcaaaataatatcctttttcatttaactgcatctctgcattccatagccctaacagataggtaacgataccaccaacgagagctatccaactcacaatactaaaggccggactataggtacttattttgttgtccatcacagtattcctttcattcctgaatatgtaagagctttatgttgctcatgcgctgcgaaacaaacgcatttgaccaaacaagcagacaaaaaaggcgatgggatagatcaccatttcataagtattgataggtgcgtttaaaacaccgataaacaagagaccgatagtgattaacgcaactaactggcagatatgggtaaaaaaatcatccagttgcccgagtttttctgcgcgaagatatgcatagttgccaaaagttgctgtcattaacacgccaagaaaatagccttttccacttaacaatgggcaactgatccatagcccaaccagataaaccagcgccccgacaacaaataatagttttgccacagtcttactggttttcataacgatctccatatctaccagcgatacattacgagtaaccaacgaaagacaaaactgaaaaatgccattaacaaatgattttcagaataaattcatactaaatattaattaattactgagatatatagatgtgaattatcccccacccggtcaggcaggggataacgtttacgccattaatggcagaagttgctgatagaggcgacggaacgtttctcgtcgtggctgataagcggcataacgctgcgcatctggtagatggctctgttctaacggtagttgcggcaacaattcaatgaggcttttctctggattcgccgcgatctgcgccagccttgctgcgcccagtgctggccccacatccccccccgtacggtaatcgagctgctgaccgctgatatccgccagcatctgacgccagtactcactacgcgccccgcccccaatcaacgtaacactttgcggtttaataccgcaggcatgcacgacatccatgccatctgccagcgcataacccacgccttccagcactgctcgcgccagttcattggggccatgttgatgagtcaaaccaaagaaaacccccttcgcctggggattattgtgtggcgtacgctcgccggaaagataaggcagaaaccaaactggctcggcactttcatcagcctgttgagctgcagcgattaaagctgggacattgctcaggccggttaatttcgcggcccaatccagacagctcgctgcactcagcatcacagacattaaatgccaacgttgcggtagcgcatggcaaaagctatgtacggcgctttctggcttgcttaagaacccttcgctgacagcaaaatagaccccgctcgtccccaggcttaacattgcctgattagcatcaaccattcccacaccaactgcaccagctgcattgtcgccaccgcctgcgacaactggcaccgtcgccataccccacgctttcgcaacttcaggtaacaaagcaccagtaatttcgctgccttcgtataatgcgggcatctggtcacgagataagtcgcaagcctgcagcatgacgtcactccagtcacgctttgcgacatccagccacatggtgccagctgcgtcagacatatcgctggcaaactcccccgtcatacgcagacgcaagtaatctttcggtaataatactttgtcgatttgacggaatatctccggctcatgccgctgaacccatagcaatttaggcgcagtaaatccgggcatcatcaggttgccggtaatcacccggctttgcggaactcgcgcttccagcaaagtgcactcttgcgcacagcgcccgtcgttccacaaaatggcagggcgtaacacccgttgctgagcatccagcaaggttgctccgtgcatctggccggcaatacccaatgctttaacgtcctgcagagaatgctgatcgcccagagctttcattgcgcgatcagttgcctgccaccactgttccgggtcttgttcgctccagagtggatgcgggcggctaacggtcagcttttccgtttgcgcagcaaccacctcaccctgctcgttgagcaaaataacttttacgccgctggtgccaagatctatcccgatatacatatcgatcgttccttaaaaaaatgcccggtatcgctaccgataaccgggccaacggactgcacagttagccgttatttgtcgaacagataatggtttaccagattttccagttgttcctggcgaccactctgatgcaccggagacaaatgatgttcctgagcatatttggctaaatctgccagactcatttggcctttcaggatttgctggcccaattcgctattccagccggaataacgctgcgcgatgcgtttatccagctcgccatcttcaatcatgcgcgctgcaattttcagcgccagtgccatcgtatccatcgcgccgatatgaccgtaaaacagatcatatttatcagtactttgacgacgtactttggcatcgaagttcagaccaccggtggtgaaaccgcctgctttgagaatttcatacatcaccagcgcattctcttccacactgttcgggaactggtcggtgtcccagcccagttgcgcatcgccacggttggcgtcgacagaaccgaacaggccaagcgcaatggcggtggctatttcatgatggaaagagtgacctgccagcgtcgcgtggttagcttcaatgttcagtttaatctctttttccagaccaaactgtttcaggaagccatagaccgtcgcggcatcgtaatcatattgatgtttggtcggttcttgcggtttcggttcgataagcaacgtgccctggaaaccgattttatgtttatgctcaaccaccatctgcataaagcggcccagttgttcacgctcctgacgcaagtcggtatttaacagcgtttcgtaaccttcacgaccgccccacaggacatagttttcaccgcccaatttatgggttgcttccatcgctgtaacaacttgcgttgccgcccagctgaagacttcaggatctgggttcgtcgccgcacccgcgccgtagcgagggtttgtaaagcagttggccgttccccacagcagcttcacgccgctctcttcttgcttgcctgccaggacatcaaccatttgcgcaaaattattgatgtactcttttaagctcgcgccctcaggggaaacatccacatcgtggaagcaataaaatggcacatgtaacttgtggaaaaactcaaatgcgacatctgctttacgcttcgccaacgccagtgcctcaccaggctgctgccacggacgattaaacgcccccacaccaaacatatccgccccgttccagcagaaggtgtgccagtagcaggcggcaaaacgcaagtgctcttccatacgcttacccaacaccagttcgtcgggattgtagtgacggaatgctaacgggttactggatttactgccttcataacgaacgcgatcgagctggtcaaaataggcttgcatattgaactccataatcaggtaatgccgcgggtgatggatgatgtcgtaatattgggcactccctttcagttgctcaattatgttatttcacactgctattgagataattcacaagtgtgcgctcgctcgcaaaataaaatggaatgatgaaactgggtaattcctcgaagagaaaaatgcaataagtacaattgcgcaacaaaagtaagatctcggtcataaatcaagaaataaaccaaaaatcgtaatcgaaagataaaaatctgtaattgttttcccctgtttagttgctaaaaattggttacgtttatcgcggtgattgttacttattaaaactgtcctctaactacagaaggccctacaccatgaaaataaagaacattctactcaccctttgcaccagtctcctgcttaccaacgttgctgcacacgccaaagaagtcaaaataggtatggcgattgatgatctccgtcttgaacgctggcaaaaagatcgagatatctttgtgaaaaaggcagaatctctcggcgcgaaagtatttgtacagtctgcaaatggcaatgaagaaacacaaatgagccagattgaaaacatgataaaccggggtgtcgatgttcttgtcattattccgtataacggtcaggtattaagtaacgttgtaaaagaagccaaacaagaaggcattaaagtattagcttacgaccgtatgattaacgatgcggatatcgatttttatatttctttcgataacgaaaaagtcggtgaactgcaggcaaaagccctggtcgatattgttccgcaaggtaattacttcctgatgggcggcagcccggtagataacaacgccaagctgttccgcgccggacaaatgaaagtgttaaaaccttacgttgattccggaaaaattaaagtcgttggtgaccaatgggttgatggctggttaccggaaaacgcattgaaaattatggaaaacgcgctaaccgccaataataacaaaattgatgctgtagttgccagtaacgatgccaccgcaggtggggcaattcaggcattaagcgcgcaaggtttaagtgggaaagtagcaatctccggccaggatgcggatctcgcaggtattaaacgtattgctgccggtacgcaaactatgacggtgtataaacctattacgttgttggcaaatactgccgcagaaattgccgttgagttgggcaatggtcaggaaccaaaagcagataccacactgaataatggcctgaaagatgtcccctcccgcctcctgacaccgatcgatgtgaataaaaacaacatcaaagatacggtaattaaagacggattccacaaagagagcgagctgtaagcgttacgccccagcgcggagcgggggcgtgatttctctccatgccgcgtgaatgaattggcttaggtggagtcgttatgccttatctacttgaaatgaagaacattaccaaaaccttcggcagtgtgaaggcgattgataacgtctgcttgcggttgaatgctggcgaaatcgtcagtctttgtggggaaaatgggtctggtaaaagtacgctgatgaaagtgctgtgtggtatttatccccatggctcctacgaaggcgaaattatttttgcgggagaagagattcaggcgagtcacatccgcgataccgaacgcaaaggtatcgccatcattcatcaggaattggccctggtgaaagaattgaccgtgctggaaaatatcttcctgggtaacgaaataacccacaatggcattatggattatgacctgatgacgctacgctgtcagaagctgctcgcacaggtcagtttatccattagtcctgatacccgcgttggcgatttagggcttgggcaacaacaactggttgaaattgccaaggcacttaataaacaggtgcgcttgttaattctcgatgaaccgacagccagtttaactgagcaggaaacgagcattttactggatattattcgcgatctacaacagcacggtatcgcctgtatttatattagccacaaactcaacgaagtcaaagcgatttccgatacgatttgcgttattcgcgacggacagcacattggtacgcgtgatgctgccggaatgagtgaagacgatattatcaccatgatggtcgggcgagagttaaccgcgctttaccctaatgaaccacataccaccggagatgaaatattacgtattgaacatctgacggcatggcatccggttaatcgtcatattaaacgagttaatgatgtcagcttttccctgaaacgtggcgaaatattgggtattgccggactcgttggtgccggacgtaccgagaccattcagtgcctgtttggtgtgtggcccggacaatgggaaggaaaaatttatattgatggcaaacaggtagatattcgtaactgtcagcaagccatcgcccaggggattgcgatggtccccgaagacagaaagcgcgacggcatcgttccggtaatggcggttggtaaaaatattaccctcgccgcactcaataaatttaccggtggcattagccagcttgatgacgcggcagagcaaaaatgtattctggaaagtatccagcaactcaaagttaaaacgagctcccccgaccttgctattggacgtttgagcggcggcaatcagcaaaaagcgatcctcgctcgctgtctgttacttaacccgcgcattctcattcttgatgaacccaccaggggtatcgatattggcgcgaaatacgagatctacaaattaattaaccaactcgtccagcagggtattgccgttattgtcatctcttccgaattacctgaagtgctcggccttagcgatcgtgtactggtgatgcatgaagggaaactaaaagccaacctgataaatcataacctgactcaggagcaggtgatggaagccgcattgaggagcgaacatcatgtcgaaaagcaatccgtctgaataacgcattgaggagcgaacatcatgagcaaaagcaatccgtctgaagtgaaattggccgtaccgacatccggtggcttctccgggctgaaaagtctgaatttgcaggtcttcgtgatgattgcagctatcatcgcaatcatgctgttctttacctggaccaccgatggtgcctacttaagcgcccgtaacgtctccaacctgttacgccagaccgcgattaccggcatcctcgcggtaggaatggtgttcgtcataatttctgctgaaatcgacctttccgtcggcagtatgatggggctgttaggtggcgtcgcggcgatttgtgacgtctggttaggctggcctttgccacttaccatcattgtgacgctggttctgggactgcttctcggtgcctggaacggatggtgggtcgcgtaccgtaaagtccctagttttattgtcaccctcgcgggcatgttggcatttcgcggcatactcattggcatcaccaacggcacgactgtatcccccaccagcgccgcgatgagtcaaattgggcaaagctatctccccgccagtaccggcttcatcattggcgcgcttggcttaatggcttttgttggttggcaatggcgcggaagaatgcgccgtcaggctttgggtttacagtctccggcctctaccgcagtagtcggtcgccaggctttaaccgctatcatcgtattaggcgcaatctggctgttgaatgattaccgtggcgttcccactcctgttctgctgctgacgttgctgttactcggcggaatgtttatggcaacgcggacggcatttggacgacgcatttatgccatcggcggcaatctggaagcagcacgtctctccgggattaacgttgaacgcaccaaacttgccgtgttcgcgattaacggattaatggtagccatcgccggattaatccttagttctcgacttggcgctggtagtccttctgcgggaaatatcgccgaactggacgcaattgcagcatgcgtgattggcggcaccagcctggctggcggtgtgggaagcgttgccggagcagtaatgggggcatttatcatggctagtctggataacggcatgagtatgatggatgtaccgaccttctggcagtatatcgttaaaggtgcgattctgttgctggcagtatggatggactccgcaaccaaacgccgttcttgattttgataaaaattttctcaaagccggttacgtattaccggttttgagtttttgcatgattcagcaggaaaagaaccatgtttactaaacgtcaccgcatcacattactgttcaatgccaataaagcctatgaccggcaggtagtagaaggcgtaggggaatatttacaggcgagtcaaagcgaatgggatattttcattgaagaagatttccgcgcccgcattgataaaatcaaggactggttaggagatggcgtcattgccgacttcgacgacaaacagatcgagcaagcgctggctgatgtcgacgtccccattgttggggttggcggcagctatcaccttgcagaaagttacccacccgttcattacattgccaccgataactatgcgctggttgaaagcgcatttttgcatttaaaagagaaaggcgttaaccgctttgctttttatggtcttccggaaagtagcggcaaacgttgggccactgagcgcgaatatgcatttcgtcagcttgtcgccgaagaaaagtatcgcggagtggtttatcaggggttagaaaccgcgccagagaactggcaacacgcgcaaaatcggctggcagactggctacaaacgctaccaccgcaaaccgggattattgccgttactgacgcccgagcgcggcatattctgcaagtatgtgaacatctacatattcccgtaccggaaaaattatgcgtgattggcatcgataacgaagaactgacccgctatctgagccgtgtcgccctttctagcgtcgctcagggcgcgcggcaaatgggctatcaggcggcaaaactgttgcatcgattattagataaagaagaaatgccgctacagcgaattttggtcccaccagttcgcgtcattgaacggcgcagtacagattatcgcagcctgaccgatcccgccgttattcaggccatgcattacattcgtaatcacgcctgtaaagggattaaagtggatcaggtactggatgcggtcgggatcagccgctccaatcttgagaagcgttttaaagaagaggtgggtgaaaccatccatgccatgattcatgccgagaagctggagaaagcgcgcagtctgctgattagtaccaccttgagcatcaatgagataagccaaatgtgcggttatccaagcctgcaatatttctactctgtttttaaaaaagcatatgacacgacgccaaaagagtatcgcgatgtaaatagcgaggtcatgttgtaacgatgatgagaattgtcggcgtcacatcaggtaacgctgcgtggttgtcggatgcggcgtgaacgccttatccgacctacccgccaggcatgataaaacgcaccaacaacgcttcaggctcgtagctcaactgcctgagacaaagtaaaaagccttatccgactgacaagtcggataaggctcaaggaaatgcaattacatatgcgccgcgattaaccgttggttatcctggtacattgcgaacaggtagttgttataactcttccctttggtgctgtagcccttcagcttgtgaatcatcgctgtggcagtcacttcctgatccgctttacgcagctgcgcacggcttttacggaagctagagtaagccgggtgcgtattcaggttagtgacataggcgctcacgctttctttgacagaactaaactgactgtaccctttcactttacctggcgcattggtacaacgtcctttcatgcatttcatgccgaacaggttgttgttgttgcgcgccagcttgctcgttccccaaccgctttctgctgcagccatcgtcgccaccatactggtggggataatgtctacgcgttcaagcaaggtattccacgggatttttcgcgtattaccggaccacttcaccttgtagcgtttggcgatgtctttcagacgcgcacgctcagcaggactccattggccctgatactgtttactaatgagccagttacgttccgcagtaatggccgcattttggctggtaatgtaaggcattacggtccggagaaacgcctttttccttggtgttccggaagggtattttcgcaaatcaggaagactactactctttgcactattgcgagaatactcttgtttactgcttacctgtttattactagctttagttaagtgggacttttgactcgctgttgttgtgtgcgtcttcgctaacacctcactgctaaacaccagagtgagtaacataagaatcatcgccccatatcgtcgtatgggagtcaaaatcatcaggtctcctggtcggatttaatcattccaacaccttatatttttcacaaatttgagagttgaatctcaaatcatatcaaaaatagctgtcaagagcaccccaaggaatagtccaaatctgaaactatgtcacgtgttaacgattcagattggcgctaaatcgcagaaaatgtgggggttatcgcaaaattcagccgttttttgcgcgagatcgctcacccttgcttctcatcctgtggacttaccgctcagggatgagttttgtttggcttatcgctggcaaactgtctgaaatcgcagcaataaggactcatccgccatgaaactcgccgcctgttttctgacactccttcctggcttcgccgttgccgccagctggacttctccggggtttcccgcctttagcgaacaggggacaggaacatttgtcagccacgcgcagttgcccaaaggtacgcgtccactaacgctaaattttgaccaacagtgctggcagcctgcggatgcgataaaactcaatcagatgctttccctgcaaccttgtagcaacacgccgcctcaatggcgattgttcagggacggcgaatatacgctgcaaatagacacccgctccggtacgccaacattgatgatttccatccagaacgccgccgaaccggtagcaagcctggtccgtgaatgcccgaaatgggatggattaccgctcacagtggatgtcagcgccactttcccggaaggagccgccgtacgggattattacagccagcaaattgcgatagtgaagaacggtcaaataatgttacaacccgctgccaccagcaacggtttactcctgctggaacgggcagaaactgacacatccgcccctttcgactggcataacgccacggtttactttgtgctgacagatcgtttcgaaaacggcgatcccagtaatgaccagagttacggacgtcataaagacggtatggcggaaattggcacttttcacggcggcgatttacgcggcctgaccaacaaactggattacctccagcagttgggcgttaatgctttatggataagcgccccatttgagcaaattcacggctgggtcggcggcggtacaaaaggcgatttcccgcattatgcctaccacggttattacacacaggactggacgaatcttgatgccaatatgggcaacgaagccgatctacggacgctggttgatagcgcacatcagcgcggtattcgtattctctttgatgtcgtgatgaaccacaccggctatgccacgctggcggatatgcaggagtatcagtttggcgcgttatatctttctggtgacgaagtgaaaaaaagcctgggtgaacgctggagcgactggaaacctgccgccgggcaaacctggcatagctttaacgattacattaatttcagcgacaaaacaggctgggataaatggtggggaaaaaactggatcagaacggatatcggcgattacgacaatcctggattcgacgatctcactatgagcctagcctttttgccggatatcaaaaccgaaagtactaccgcttctggtctgccggtgttctataaaaacaaaatggatacccacgccaaagccattgacggctatacgccgcgcgattacttaacccactggttaagtcagtgggtccgcgactatgggattgatggttttcgggtcgataccgccaaacatgttgagttgcccgcctggcagcaactgaaaaccgaagccagcgccgcgcttcgcgaatggaaaaaagctaaccccgacaaagcattagatgacaaacctttctggatgaccggtgaagcctggggccacggcgtgatgcaaagtgactactatcgccacggcttcgatgcgatgatcaatttcgattatcaggagcaggcggcgaaagcagtcgactgtctggcgcagatggatacgacctggcagcaaatggcggagaaattgcagggtttcaacgtgttgagctacctcagcagccatgatacccgcctgttccgtgaagggggcgacaaagcagcagagttattactattagcgccaggcgcggtacaaatcttttatggtgatgaatccagccgtccgttcggtcctacaggttctgatccgctgcaaggtacacgtagcgatatgaactggcaggatgttagcggtaaatctgccgccagcgtcgcgcactggcagaaaatcagccagttccgcgcccgccatcccgcaattggcgcgggcaaacaaacgacacttttgctgaagcagggctacggctttgttcgtgagcatggcgacgataaagtgctggtcgtctgggcagggcaacagtaacttttccggcttcccgttcgtcagtacctcgggaagccgccaaccaggataaaatgtcagccctaatcagcgttgcaggataaagcaccgctcactcttcaacagaccgatttgcaccccagcaaatgtagcgttattgttaccttccttgctacagagttcgacagatatcccgctatgacattctccctttttggtgacaaatttacccgccactccggcattacgctgttgatggaagatctgaacgacggtttacgcacgcctggcgcgattatgctcggcggcggtaatccggcgcagatcccggaaatgcaggactacttccagacgctactgaccgacatgctggaaagtggcaaagcgactgatgcactgtgtaactacgacggtccacaggggaaaacggagctactcacactgcttgccggaatgctgcgcgagaagttgggttgggatatcgaaccacagaatattgcactaacaaacggcagccagagcgcgtttttctacttatttaacctgtttgccggacgccgtgccgatggtcgggtcaaaaaagtgctgttcccgcttgcaccggaatacattggctatgctgacgccggactggaagaagatctgtttgtctctgcgcgtccgaatattgaactgctgccggaaggccagtttaaataccacgtcgattttgagcatctgcatattggcgaagaaaccgggatgatttgcgtctcccggccgacgaatccaacaggcaatgtgattactgacgaagagttgctgaagcttgacgcgctggcgaatcaacacggcattccgctggtgattgataacgcttatggcgtcccgttcccgggtatcatcttcagtgaagcgcgcccgctatggaatccgaatatcgtgctgtgcatgagtctttccaagctgggtctacctggctcccgctgcggcattatcatcgccaatgaaaaaatcatcaccgccatcaccaatatgaacggcattatcagcctggcacctggcggtattggtccggcgatgatgtgtgaaatgattaagcgtaacgatctgctgcgcctgtctgaaacagtcatcaaaccgttttactaccagcgtgttcaggaaactatcgccatcattcgccgctatttaccggaaaatcgctgcctgattcataaaccggaaggagccattttcctctggctatggtttaaggatttgcccattacgaccaagcagctctatcagcgcctgaaagcacgcggcgtgctgatggtgccggggcacaacttcttcccagggctggataaaccgtggccgcatacgcatcaatgtatgcgcatgaactacgtaccagagccggagaaaattgaggcgggggtgaagattctggcggaagagatagaaagagcctgggctgaaagtcactaaaaattgcctgatgcgctacgcttatcaggcctacatgatttctgcaatatattgaatttggaagaatttgtaggccggataaggcgtttacgccgcatctggcataaacaaagcgcactgttccggcgttgagaaacgccggaaaacgtttcaaacaggctgctgccgtagccgatgccgctgcactttctcgacatccatgcactgcaacgcctttgtcgggcaggcttcaacacaggccggtcccgtctcccgatgccagcacagatcgcacttaatcgccctcgcctttttgcggctagaaacgacctccatcgcaccaaacgggcaagccagcatacagcttttacagccaatgcaacgtgtttgttcaacgaaaatatgcccatgttcgcggcttatcgcgtcaacagggcagacattcgcgcacggtgcatcttcacactgatgacaggctactgccgtggtccagcagtggtctttaatgacacgaatacgggaaataaactcgtctggactcaacgcagcgcaatcctgattctcatgatggctcactgcgcaagccacttcacaggtacggcaaccgatacatttcgtcgcatccgcaataataaaccggttcatgatcactcctttgcactaaaacagcagagtgccagagagcgcgtccctactgctttgatccaacgaaggaaatgttaaagttttggcacttgtccaaagcgttatgtgatcgcgcccaggtcatccctgacagtaaatcccagttcattagaaatagcctgcgcggtttcacgcagtggtttcaggagatttttctctcccacctgtttcagacgacttgtgctaaggctaatgctcacggcgtacggcacccgcccatgaatatcaaacaccggaacagcaatacaggagacgccgagttcgttttcttctctgtccatcgccgctccgctttcacgaatgtgcgccagttcgtcgaacatcgcgggcagctcggtaatggtattgcgggttaacggctggatctcatgctgatggctttcccagtaactcttcacgtagtccgggtgaccaaacgccatgtagatcttgcccattgcggaacagtagagcggcatatgctggccaatataggcacgggttcgcagcatcccggttgtgggttccagcttataaatcaaaatagcgtgatcgtcttcgcggctggagaagttaatggtttcaccagtggcgatgttcagtgcctcaagatgcggagcggcgatatgaatgatattcaggctagacagcgccttctgcccgacggcaataaatttggtggtcaggcgataactccctgcggcaggcgcggtggtcacatagccgcaggactgtaatccctgcaataagcgatggacggtactcttatttaaaccagccagctcgctaagatgcgccaacggacaaccgtttggatagttgctcaaaatctcaatcagcatcaacccgcgaaacagactctggcttccggctggacgctctttttcctgcgccatctcgttctctttttttcccatcacttctttccccattttgtcgcgtcctgatggtagcgcaaagtgtgccgtagttcacgatctcgacagataatttataaccaattgatttttatgtcttttgaaattcatcaatcagattgccttgttaaaaagtgatcgatatatttgaaatcaagtttcgcatattgaaattttaagccaaaaaagcgatcaaaaaaacaaggaagcctgggatgaaagtgacatttgagcagttaaaagcagcctttaatcgggtcttaattagtcgcggcgttgacagcgaaacggctgacgcctgtgcagagatgttcgcccgcaccaccgaatccggcgtttattctcacggcgttaatcgtttccctcgtttcattcaacaactggaaaacggcgatatcattcctgatgcccaacccaaacgtataaccagcctcggcgcaattgaacagtgggacgcccagcgtagcatcggtaacctgacagcgaaaaagatgatggatcgcgccattgaactggctgccgatcacggtattggtctggtggcactacgtaatgccaaccactggatgcgcggcggcagctacggctggcaggcggcggaaaaaggctatattggcatttgctggaccaactccatcgccgtaatgccgccgtggggcgcaaaagagtgtcgcataggcactaacccgctgatcgtcgccattccttccacgccgatcaccatggtcgatatgagcatgagcatgttctcttacggcatgttagaagttaaccgtctggcaggtcgtcagctcccggtcgatggtggctttgatgatgagggcaatttgaccaaagaacctggcgttatcgagaagaatcgccgcattttgccgatgggctactggaaaggttctggcatgagcattgtgctggatatgatcgctactctcctttccgacggcgcatccgttgccgaagtcacccaggacaacagcgacgaatacggcattagtcaaatttttattgccattgaagtggacaagcttatcgacggtcccacccgcgatgccaagctgcaacgcatcatggattacgttactagtgccgagcgtgctgacgaaaatcaggccattcgcttacccggccatgaatttactaccctgctggccgaaaaccgccgtaacggcatcactgttgatgacagcgtgtgggccaaaatccaggcgttatgaggagataagtcatgatttttggacatatcgcgcagcccaatccgtgccgtttgcccgccgccattgaaaaggcgctcgattttctgcgcgctaccgatttcaacgccctggagccgggcgttgtcgaaatcgacggcaaaaatatttatacgcaaattatcgatttaaccacacgcgaagcggtggtaaaccgtccggaagtgcatcgtcggtatatcgatattcagtttctggcgtggggcgaagagaaaatcggcattgctattgatacgggaaataataaagtcagcgaaagtctattagagcagcgcaatattattttttatcacgacagtgaacatgaaagttttatagaaatgataccgggcagctacgcaattttctttccgcaggatgttcaccgaccaggttgtattatgcaaacagcctctgagatacgaaaaattgtggttaaagtcgcattaacggcgctgaattaatcgaataatcgtctacgccagaacgcctgggtaatgttattgctctaactatattaataattcaggttgctgcacatgcgacttgaattatgacagacatagcctcaaggaatagctatgaaaaaaatactcgaagcaatactggcgattaatctcgccgtactttcctgtattgtatttataaacattattttaagatatggttttcagacaagcattttatctgttgatgaattgagtcgttatttatttgtctggttaacgtttattggcgcgattgtagcttttatggataacgcccacgttcaggtcacctttctggtggagaaactctcccccgcatggcagcgacgagtcgctctggttacccattccttaatcttatttatttgtggcgcactggcctggggcgcaacgctaaaaacaattcaggactggagcgattatagtccgatcctcggtttacccatcggcctgatgtatgccgcttgtctgcccaccagcctcgttatcgcattctttgaactgcgtcatttatatcaactcatcacgcgtagcaattctctaacgagcccaccgcaaggagcttaatcatggctgtgctgatttttctgggctgtctgttgggtggtattgctatcggtttgcctattgcctgggcactgttgttgtgcggggcggcgttaatgttctggctggacatgtttgatgtccagatcatggcacaaacgctggtgaacggagccgatagcttctccctgctggcgattccgttctttgtgctggcgggtgaaatcatgaatgcgggcggcttgagtaaacgcattgttgacctgccgatgaaactggtggggcataaaccaggcgggctgggctacgtcggcgtgctggcagctatgattatggcgagcctttctggttctgccgttgcggataccgccgccgttgccgctctactggtgccgatgatgcgcagcgccaactatccggtcaaccgggcggcggggctgattgcctctggcggcattatcgcgccaattattcccccttccattccgtttattatcttcggcgtttccagcggattatccatcagtaagctgtttatggcgggcattgcccctggcatgatgatgggcgcaacgctgatgcttacctggtggtggcaggccagtcgccttaatttaccccgccagcaaaaagcaacgatgcaggaaatctggcactcttttgtctccggtatctgggcgctgtttcttccagtcatcattattggcgggtttcgctccggcctgtttacccctaccgaagccggggccgttgctgctttctatgcgctgtttgtcgccacagttatttaccgtgaaatgaccttcgccacactttggcatgtactcattggcgcggcgaaaaccaccagtgtggttatgtttctggtggccagcgcacaagtttccgcctggctgattaccattgctgaactgccgatgatggtttctgatttactgcaaccgttggtcgatagtccgcgtctgctgtttatcgtcattatggtggctatcctgattgtcggcatggtcatggatttaacgccgacggtattaattcttaccccggtattaatgcctttagttaaagaggcaggaatcgatccgatttatttcggtgtcatgtttatcattaactgcagtatcggcttaattacaccgcctatcggtaatgtacttaacgttattagtggggtggcaaaactcaaattcgatgatgcagtcagaggcgttttcccttacgtcctggttttatatagtttattagtcgtatttgtttttattcccgatctcatcatcctccctttgaaatggattaattaaaaggaaaatattatgaaattacgctctgtaacctacgcattattcattgctggcctggctgcattcagcacatcttctctggcggcacaatctttacgtttcggttatgaaacaagtcaaaccgacagccaacatattgcggcgaaaaaattcaatgatttattgcaggagagaaccaaaggcgagctgaaattaaaactgttcccggacagcactctcggtaacgcgcaggcgatgatcagcggcgtacgtggcggcaccatcgatatggaaatgtccggcagcaataactttgccgggttaagtccagtgatgaacttgcttgatgtccctttcctgttccgcgataccgctcacgcgcataaaacgctcgacggcaaagtcggtgatgatctgaaagccagtcttgaaggtaaaggactgaaagtactggcctactgggaaaacggctggcgcgatgtcaccaacagccgcgcaccggttaaaacccccgccgacctgaaagggctgaaaatccgcaccaacaatagcccgatgaatatcgccgcattcaaagtctttggcgctaacccgatcccgatgccgtttgccgaagtctataccgggctggaaacccgcactatcgacgctcaggaacacccgatcaacgtcgtctggagtgcaaaatttttcgaagtgcagaagttcctttctctgacgcaccacgcctattccccgcttctggtggtgatcaacaaagcgaagtttgatggcttaagtccggagttccagcaggcgctagttagttctgcacaagaagcgggtaactatcagcgcaaactggttgctgaagatcagcaaaaaatcatcgacggcatgaaagaagcgggcgtggaagtcatcaccgatctcgaccgcaaagcctttagcgacgcactggggaatcaggttcgcgacatgtttgttaaagatgtgccgcagggagctgatctgctgaaagccgtggatgaggtgcaataaaccatgacgcaatactggctggggttagattgtggcggtagctggctgaaagccgggctgtatgaccgcgaaggccgggaggcaggcgtgcagcgcctgccgctgtgcgcattaagcccgcagccaggctgggcagagcgcgatatggcagaactgtggcaatgctgcatggctgtcattcgcgccctgcttactcattctggtgttagcggggaacaaattgtcggtatcggcatctccgcacagggaaagggcttgtttttgctggataaaaacgacaaaccgctcgggaatgctattttgtccagcgaccgccgggcgatggaaatcgttcgtcgctggcaggaagatggcatcccggaaaaactctacccgctgacccgacaaaccttgtggaccgggcatccggtgagcctgttacgctggctgaaagagcacgaaccagaacgctacgcgcaaattggctgcgtgatgatgacgcacgactacctgcgctggtgtttaactggcgtcaaaggctgtgaagagagcaatatttccgagtccaacctctacaacatgagtcttggggaatatgacccgtgcctcaccgactggctggggatcgctgaaatcaatcacgccctgccgcctgttgtcggatctgccgaaatctgcggggagatcaccgctcagacagccgccctgaccggtctgaaagcgggtacgcccgttgttggcggcctgtttgatgtggtttccaccgcactctgcgccgggatcgaagacgaatttaccctcaatgcggtgatggggacctgggcggtgaccagcggcataacccgcggtttacgtgacggtgaagcgcatccgtatgtctatggtcgctacgttaacgatggtgaatttatcgttcacgaagccagccctacctcttccggcaacctcgaatggtttaccgcacagtggggagaaatcagctttgatgagatcaatcaggccgttgccagcttgccgaaggctgggggcgatctctttttcctgccgttcctgtacggcagcaacgccggactcgagatgaccagtggtttctacgggatgcaggccattcacacccgcgcgcacctgttgcaggccatctatgaaggggtggtgttcagccatatgacccacctcaaccgaatgcgcgaacgttttactgatgttcacaccctacgcgtcactggcggcccggcgcactccgatgtctggatgcaaatgctggcggacgtcagcggtctgcgtatcgagctgccgcaggtggaagaaaccggctgctttggtgcggcccttgccgcccgcgtcggcaccggggtttatcacaacttcagcgaagcccaacgtgacttgcgacacccggtgcgcaccctgctgccagatatgaccgcccatcagctttaccaaaaaaaatatcaacgttatcagcatctcattgccgcacttcagggctttcacgcccgcattaaggagcacacattatgagccgaccacttctgcaactggccctcgaccacagtagtcttgaagccgcgcagcgcgacgtgacgctgttaaaagacagcgtcgatatcgtcgaagcgggcaccattctctgtttaaacgaagggcttggcgcggtgaaagccttgcgcgaacagtgcccggacaaaatcatcgttgctgactggaaggtcgccgacgctggtgaaacgctcgcgcaacaggcgtttggcgcaggcgctaactggatgaccatcatctgcgccgcgccgctcgcgacggtagaaaaaggccacgcaatggcacaacgctgcgggggtgaaattcagatagagctgttcggtaactggacgctggacgacgcccgcgactggcatcgtattggcgtgcggcaggccatttatcatcgcggtcgtgatgcacaggccagcgggcaacagtggggcgaagccgatctggcacgcatgaaggcgcttagtgatatcggccttgagctttccattactggcgggattacccctgctgacctgccgctgtttaaagatatccgcgtgaaagcgtttattgccgggcgggcactggcaggcgcggcaaatccggcgcaagtggctggcgatttccatgcgcaaatcgacgctatctggggaggtgcgcgtgcgtaatcatcagttagggatttatgaaaaagcgctggcgaaagatctctcctggccggagcggctggtgctggcaaaaagctgcggttttgattttgtcgaaatgagcgtggatgaaaccgacgaacggctcagtcgtcttgactggagcgccgcacaaaggactagcctggttgccgcgatgatcgaaacaggtgttgggatcccgagcatgtgcctgtccgcacatcgtcgctttccctttggtagccgtgacgaggcagtgcgcgaacgggcgcgggaaatcatgagtaaagcgattcgcctggcgcgcgatctcggcattcgcaccatccagctggcaggttatgacgtctattacgaagaccacgacgaaggcacccggcaacgttttgctgaagggctggcgtgggcagtcgaacaggcggcggcaagtcaagtaatgctggcggtggagattatggataccgcgtttatgaactccatcagcaaatggaaaaaatgggacgagatgctcgccagtccgtggttcaccgtctacccggacgtcggcaacctcagcgcctggggcaatgatgttcccgccgaactgaaactgggcattgaccgtatcgccgcgatccacctgaaagacacccagccagtcaccgggcaaagtcccggacagttccgcgacgtgccgtttggcgaaggctgcgtcgatttcgttggcatcttcaaaacgctgcataaactgaactatcgcggttctttcctgattgagatgtggaccgaaaaagccaaagagccggtgctggagattattcaggcgcggcgttggattgaagcgcgtatgcaggaggctggatttatatgttaacgtaaatgcaggaggctggatttatatgttagagcaactgaaagccgacgtgctggcggcgaatctggcgcttcccgctcaccatctggtgacgttcacctggggcaatgtcagcgcggtagacgaaacgcggcaatggatggtaatcaaaccttccggcgtcgagtacgacgtgatgaccgccgacgatatggtggtggttgagatagccagcggtaaggtggtggaaggcagcaaaaaaccctcttccgatacaccaacgcatctggcgctctaccgtcgctatgccgaaattggcggtattgtgcatacccacagccgccacgccaccatctggagtcaggccgggctggatctccccgcctggggcaccacccacgccgattatttttacggtgccatcccctgcacgcgacagatgaccgcagaggagattaacggcgaatatgaatatcagaccggcgaagtgatcattgaaaccttcgaagaacgtggcaggagtccggcacaaatcccggcggtgctggtgcattctcacggcccgttcgcatggggtaaaaacgccgccgatgccgtgcataacgccgtagtactcgaagaatgcgcctatatgggtctattcagccgccagcttgcgccgcagctccctgcgatgcaaaacgaactgctggataagcactacctgcgtaagcatggggccaatgcctattacgggcagtaatccctcacgccggggcttcatcgccccggcactacgaattgatatgttccttgctgtaacgccgcttccacgctgctggcgttaaaccagtatgtttctgaaaaatctgccggaaatagccaacgtcattaaaccgtattgcatggagcaggccgacaacgtcgagtcactgcataacctgttgctgcccgccgatgcgccatttacgacatttgaaggcaagggattgttcagccataagatcctgattcagacgccaggttcccggtatgaacagagcaatccagagcaacaacctttgtggcattacgacggagcaccagccgcaccgacatccaccggtgaattaaaaacgccagctcaccccggtgacaaaggtaaaactctcattacgatcaatcatcgggctgtcggtaatctcttccggcagctcgctgtatcctgcgctcgccatcaatacgacgtgctctcctatcgggtattttgccgtcaggctgacatagggcacccaggcatcctgcgcggaataacttgccagaccgctacgacgggactcactctcactaatgccatagtaatagtcactgaaattctcgtcataatagagaacgcccagcgcaggtgtcaggctcagacgacctatctgcattttgtggaatacgcttagctcccccacccagccgttgctgttatccagaacgtccgcagctgcagaggctttcacggttccccaacgctcgtggtgataccaggcaacccccgccatagccgtactatcacgcttatcaagctgttgcatggcataatcgtcattatcggtagggtcaaattccagcggcatccaggatgcggtcaggctaagttcatttttttcactttggctcagaataaaacctaacgtggtctgacgaacataaaaagtatcaccttcataactaatcagcggaattgccttcgtattttcattataaccgcgataagggctttcattataagccgcaccagcaccaatggataattcagaagcagttgcgcttgccataaaaggcaacgcaaataacgccacaatattgcgattaattaacatgtccggtattccattttaaaataagataaaaaagagtcggcataataatgcttacaatttctccggtgcaagattcatatttatatagtaatatataaaattatatataattgggctgttgcgatgacaaaattacaacttaagtaccgggagttaaaaattatcagcgtaatcgctgccagtgaaaatatcagccatgccgcgactgtacttggcatcgcacaggccaacgtcagcaaatatcttgctgattttgaaagtaaagtgggtttaaaagtctttgaccgaaccacccggcagctgatgctcacaccttttggcaccgcgctgttaccgtacatcaacgacatgctggacagaaacgagcaacttaataattttattgcagattataagcatgagaaacgtggtcgggtcaccatctacgccccaaccggcataattacctatttatccaaacatgtaatcgataaaattaaagatatcggtgatatcaccttaagcctaaaaacctgcaatcttgagcgtaatgccttttatgaaggcgtcgaatttcctgatgattgtgatgttttaatcagctacgctccaccaaaagatgaaagcctggttgccagttttattacccaatatgccgtaaccgcttatgccagccagcgctatcttgagaaacatcccattagccgtcctgacgaactcgaacatcactcctgtattttgatcgacagcatgatgatcgacgacgcgaatatctggcgcttcaacgtcgccgggagtaaagaggtgcgggattatcgcgtgaagggaaattacgtttgcgacaacacgcaatctgcgctggagctggcacgaaatcacctggggattgtgtttgcgccagacaaaagtgtgcagagcgacctgcaagacggcacgctggtgccctgctttcagcaaccctatgaatggtggctggatctggtggctatcttccgtaaacgggaataccagccctggcgggtccagtatgtgctggatgaaatgctgcgtgaaattcgccaccagcttgctcagagccagcaactgcggcctgaacaagcggcggaaagcgaagattaatgatcgagataaaggtaatgcacccagctggtcatgcgtaatagcactttgcgcatcacgctgacatggctgaaatgatcagagtaaaccgccacctgggcgtaaataccgtctggtaaagcgctcaaatcagtgtgctcatccagttcaatggtcgcgataacgccatcactacccggcgctgtgtttaacgtctgtaaggtgccggtgctctgataagctccgccgggaacggctggactaatggctgccagcttaccgctgaataccttacctggcagagcattaaacaccacttccgcatcgtcgccaggagccagtcgcagcaaggagttctgacggaactgcgccacgatttgtcgtttctgatcgggtataaacaccatcaccggacgtagcggcaggctcgcggcataggtacccggacgaatcagtacctgggtcacataaccatcgctcggcgcacgcactatcgtctgctcaaggttatattttgcttccgcgagctgtgctttcaggctggcgatttgagaatgttcacccaacaccaggctatccagctggctctggatctgtttttgttccgccgcgctactcttcacggaggcttcctgcgccagataattttgccgcgccacatcgatatcgcgttcactaaacgggtttactttcgcctggctgccacgtgcgtaacgctgatactctttagcgaatttatcccgcgtggcctttgcctgctgagtattcgccgccatctcatctaactctgcgcccaacgcccgctgtttatgttctgcggtaacgatatccgccatcagccgatccacccgcgcctgataacgcgtcgggtccagtcgaaatagcacctcaccttttttaatcagcgtatttttcttatccgtcacttcaatcaccacaccagtcacctgtgggacaacaggaatagaaataaccgctttttgcgctttaaaggtatacggatggttatagttcattaacagaattagaccgctgacaataaatattccacccagggccgctgtgggaatggtccatttatttacgggaattttgaagatcttaaacattgcccatgcaaaagccacataggtcaaaataatcagtaaatccataagtattactcggcagaagaggatttgatgtcggcgagctgtttctccagcccggcaatgcgctgttgcagttgcataacggaactatcatggctttgcattccccatccccgctccgggcggtaaagcgtggcccaaatccacaaaaacggccagataacatgtaacgtaaaaagactcacccaaccagcaacatgaatggcgtcggcatgaggatgattacgttttttggcaatcaggtagggaatatcatgtaaaataatgatcccatagaagatcaccagaaatacaaaaataagcactcccagtgcaaaatagtccaggaacatatttccctcaaagaatataaaaaagaacaattaacgcatattatgaaatgccatgatgcagtgcaatttccttatttatataacgacatattgttttttatatactttcttaaatgtgctgtctggtttttcaacaggacgaggtttatcatattgaaatagtggaactattggccaaactaatgaataactccagtaaaacatccacagtacagattaagcgtattaaaccttcaattatctaccgtttattgctgattggcctcggatcaccaatggtgatttacggcctggttcgcccgctcaccatcgaaacgcgagattaaactcctgacaaaacacgccccagaaacgtacttctgttggcgtagtctgggttattgcgcacgtaggtttaaaacgtaaattgtaacaacgtgcgctttgtttatgccggatgcggcgtgtacgccttatccggcctacggtcaggttcccgtaggcatgataagacgcgtaagcgtcgcatcaggcaatgaatacccaatgcgaccagcttcttatatcagaacagccccaacggtttatcgctgtagctcaccagcaggcacttggtttgctggtaatgctccagcatcatcttgtgggtttcgcgaccgataccactttgtttgtagccaccaaacgccgcatgtgccgggtaagcgtgataacagttggtccacacgcgcccagcctgtatgccgcgccccatcttataggccagattaccgttgcggctccagacgcccgcgcccaggccatattgcgtatcgttcgccagctccagcgcttcttccatcgttttgaaggtggtcaccgccagcaccgggccaaaaatctcctcctggaacacccgcatattgttctgaccaaacagaatcgtcggttcgaggtagtagccgtctttcagttcaccttccagcagcttgcgccgcccgcctgtgagcacgtcagcgccctcttttttaccgatatcaatgtagttgaggatggtttccagttgcccgtgagaaacctgcgcgcccatttgcgtcacgctgtcgagcgggttaccgctacgaatgctttcgacacggcggatggcgcgttccataaagcgttcgtagatagattcctgcactaaagcacgactcggacaggtgcaaacttcgccctggttaaaggcaaacagtgcaaagccttccagcgctttatcgaaaaaggcatcttcttcatccatcacatcagcaaagaagatatttgggctcttaccgcccaactccagcgtcaccggaataatgttttgcgttgcgtattgcataatttgttggcccacttccgtactgccggtaaacgccactttggcgatgcgtttgctggtcgccagatattcgccaattaccccacctgcgccattgaccacgttcaccacgcccggcggcagtaaatcaccgacaatttccattagcagcagtacagaaagcggggtaagacgtgcgggtttcagcaccacacagttgcccgccgccagcgcgggagccattttccagctcgccatcagcagcgggaagttccacgggataatctgccccaccacgcctaacggttcatggaaatgataggccacggtttcgctatcaacttcactgatcccaccttcctgcgcccgaatacagctggcgaaatagcggaaatggtcaatcgccagcggtacatccgcagcactggtttcgcgaatgggtttgccgttatcccaggtttcagctgtcgctaacagctcgaggttttgttccattcgatcggcaatcttaaacagaatcgccgcacgatcctgcacgctggtgtgcgcccatttatctttcactttgtgcgcagcatccagcgccagatcgatgtctcgtttgccgctagacgccacttcgcacagcagctgcccggtcaccggcgtcagattctggtaatactcgccgtcggcaggggctacccattcgccgccaataaagttgtcatagcgggcttttaacttgagggggaaaccatactcgccgggcttaatctgtgcactagggggattattggtcatgatcgtctccttgcggtgtgaggtataacaagggtagacgtgactggcgaaatcttcgccagtcggtaacagctttacgacagctatcacgaatttacgggcaagggttacagagatagttgaaaaagcggctaacaatttgccagccgttgtggaaatgatgattacatcgctgcgcgataaatcgccacaatttcttcgtgagttgcctggatcgggttagtaaagccacaggcatctttcagggcattagtcgccaataccgcgaaatcttcttctttcacgttcaggtcgcgtaggcctgccgggatatccactttcttcgccagttcacggatggcgttaatgcaggcttcagcaccttccgcgtcgtttttacctgtcacgttcacgcccattgcagcggcacagtcacgcagacgtgcagcggcgactttgctgttgaatacctgaacgtgcggcagcaaaacggcgttacatacaccgtgtggcaggttgtagaaaccgcccagctggtgcgccatcgcatgaacataacccagagaagcattattgaacgccataccggcgaggaactgggcataagccattgcttcacgcgctttcgcattactgccatcttcaacggctaacggcaggttttcggcaatcatggtcacggctttcagtgcacaagcgtcagtgatcggcgtggcggcaatagaaacatatgcttcgatagcgtgcgttaaggcatccatacccgttgcggcggtcagactcttcggcataccaatcatcagagaggagtcattgacagaaagcagcggagtgacatgtttatcaacaatcgccattttgatatgacgcgcttcgtcagtgatgatgcagaaacgggtcatttcagaggccgtacccgccgtggtattgatggcgatcatcggcagctgcggttttgcagagcggtcaacgccttcgtaatcgcgaatatcgccgccattggctgccaccagcgcaataccttttgcgcagtcgtgtggagaaccaccgcctaaggagatcacgctatcgcaattattctctttaagtaatttcaaacctgcggcgacgttttccgtggtggggttaggttgggtgccatcataaataacgctaaaaatattgcgttcttccagtgctttttgcacatcgcccgccatacctaatttcgttaacatattgtcagtgacaattaaggtacgggtaaatccataatctgccatcatattcattgcatcagtcaaactatcagcgccgatgacattcacagaaggaataaagaacgtactagctgccataacacactcctgaaagtgtaaaaaagggcgggcagcttactgaggattttcattcgaaaatatgatcagtattattgattatcaaaattaatctaataaaaagcacattgtattcattaaacaatgtgctttttttaaattcataagaattttgtattaatttattttaaaacttaattaatcatttccttatttttccggaaataataatgcgtcgcgcaataaatgatcatttccacgacgacgcgtaaagccaatgcggtcaaaatattccagaatctgaattgccagctttcggcctacgcctaagcgatcgcggaaatccgccgcgcaggtactaccacactcctgatcgagatcgcggatcatattggcaaactcgacaatccgatcgttacggtaataacgatctttaacgatcgcggtaattattccttgctgcgccgcctggcgtagagtcaggcgcattgcctgctcgtcggttcccgtctcttttgccaggtcacgcacccaccacggttcgtcaccaaacagtggctctgctttttgccagatggcctgctgctcttcgctgaagcccgctttgtgatctggcagatgcagccagccgtgatggctgtggatgtcgccgctttcgcgcatcttttcaatcagcaacagtaccagcgcttcatcttccattggcaacgccatacgtcgcagacgttcgcgcccagggccaggttcatcgcgatgttgctcatgataagtcgctaatgtgtcgagaattttccgctgccagcgggcggcaaccggcgcattcaacaagctataaccagcctgaatataaccaggctgttgcagcaattcgcgcatcccttcgccgttgagctggcgcgcccaggcgaaatccgcaaggttaaccgcgccgcgttccagatgaacagataacgcatcggcatcgctctgcgcccgtgcaagagacgccagccattgcagatattccggcttacgtttaccgcgacgcggcgggttaagcatcacgacgcgcgctccggccagcgtgttgcgggcagagatatcgcgcaataccaggcggtcgttatctgccagccataacggggtgtcgaagaccagttcagcaaggttatcttccagcagactaacgcgtcccgtgacgtggctggcggcgtggtgaatatgcagcggctgccactgggtcagcggtgtatgggtttgaagctcgacaatcacccgtgtgaacggctctggcggcacatcggcaagcagccagtcgccacggttaatctgctctttttccgcatcacccgcgatgttaagcgcgatacgctgcccggcattggcggtttctgttggctggttttgcgcatgcagcgcacgtacacgcatcggtttatttacaccagtcagccagagactatcgcctaccttcacttccccgcttaacgccgtaccggtgacgaccagcccggcaccttttacggtaaatgcgcggtcaatcgcgaggcggaaactatgttggctggcgtgctcgcgttccggcaactgaagcagatgctcgcgcagggcatccattccccgaccttcggttgctgcggtgataaacagttttgcctcagcaaaaccgtattcccgcagaacctcctttacctggcgttcaacctcatcaacacgcgcttcgtccacgcgatcggctttggtcagcgccactgtcagcatcgggttaccggtcagctgcaaaatcgccagatgctcacgggtctgtgccatcacgccgtcatcgcacgccaccaccaacagcgcgtgatcgataccaccaacgcccgccagcatgttggaaagaaacttttcatgaccgggaacgtcgataaaaccaggcacgcgaccatccggctgcggccagtaggcatagccgagatcgatggtcatgccgcgctttttttcttccggcagacggtcagcatttacgccagtaatcgcctgcaataaggttgttttgccgtggtcaacgtgtccggcagtcgcaataatcatttcaacaacatctccaaaaaccgttgctcatcttcaaggcagcgtaaatccagccacaatcgtccgtcataaatacgaccaatcaccggcactggcaattcacgccagcgggcggctaaactctcaaggtggctaccgcgtccatcatggggtgtaaacgttaatgccgcgctcggcaggcgatcaaccggcaggctaccactgccaatctggctaagacatggcataacctgtaccgcaaactccgcgccgtaatgtgcggcaaggggggcctgtaaacgttgtgcctggatttgaatgacctctgcgctgcgggtaagcaggcgcagggtcggtaatttttcactcagagcttcagggtgtaaataaagacgcaacgtggcttccagcgccgcgagggtcattttatccgcgcgtaatgcacgcttcagcgggtggctttgcaggcgggcgatcatctcttttttaccaacaataattcctgcctgcggcccgcctaacaacttgtcgccggagaaactcaccagactgacgcccgccgcaatcaactcctgcggcattggctctttcggcaaaccgtactggctaagatcgaccaggctgccactgcctaaatcagtcactacgggaacatccagctctttgccgagcgccaccagttccgcttcatctatcgctttggtgaacccctgaatgctgtagttactggtatgtactttcatcaacagtgcggtattttcattcaccgcctgacgataatcattcgcgtgcgtgcggttggtggtccctacttcgtgtagggtgcagcctgcctgacgcataacatcgggaatacgaaacgcgccgccaatctccaccagttcgccgcgagataccaccacctcttttccgctggcagtggccgccaacatcaataacaccgccgccgcattgttattgacgatacaggcatcttccgcccccgtaatacggcacagcagctgcgccagcgcccgatcgcgatgtccgcgtccggcgtcgtccagatcatactcgagggtcactgggctacgcatagcctgcgcaacggcttccaccgcggcttccgcctgtaaagctcgcccaaggttggtatgcagcacggttcccgtcaggttgatcaccggacgcagcgcgctctgcgcttctttcgtcaaccgggcatcgacttcttgcgcccagttttcacaccacgcaggcagcgtctggctgccacgaatcacttctcgcgcttcgtcgagcatctgacgcaacaattccaccacgcgggtgtgaccataagtatcacgcaaagaaaggaaggagctatcgcgcaataagcgatcaatagccggaagttgactatagagggaacgcgtttcggttgtcataggaaacctggctgatcaaggccctctcacacggagaagggcgtttaacataaccacggattgtaacgtgagatgggtcaggaggacatatcgcgcatcaagcctttggcggttcggtgcgagcaaaactttcgcggctaaacaggttttcgaccagtttgactaagtgtgggcggtcgacacaccaacctggcgcaacgcggcggaaattgagatatccgacggcacaggcaatggcgatagtcgccagattgaccgtatcggttttgagtgtgccatcgaccagatatccttccagcacatccagactgcggttgattttctcccgctggcgtaacaattcatcttcagactgctgcgccgctggacgcgcctgttcacgcacgcttaccagcccggcatccataatgccatccgccagtgcctcaattttgcgcacccgcaagctctccagcggatcgcgcggcaacatcgccggagcgacattcattaattcaatatattcagcgatgatcgggctatcaaaccagcattcgccctcttcggtcaccagcaccggcacttttcctaacgggttaaattgcgccacgccgttgtccgcgttatagggcagttcattaataaattcgaaagttatgcccttttctaacaacagaatagaaagtttgcgtacaaacgggctggtgtagctaccgacgagtttcatgccgagtcctttgtgcgaggaaaaatatcagtatggctcaatgatccaaataaagataatgcatccagctggtcattcttagcagcactttccgcatcacgctaacatggctgaaatggtcggagtaaaccgccacctgggcgtagatgccgtcgggtaaggcatcgatatcatcgttagggtccagttcaatggttcccagcacaccgtccgtgccgggcacgaccgttaaactttgcaataccccctgcgcctgataagaaccgcctggcacgacaggtaaaatactagtcagtttgccgtgaaacacctgcccaggtagcgcgttaaacaccacttccgcatcatcgccaggtttcagacgtaacaggctgttttgccgaaattgggcgacaatttgccgtttttgctcggggatgaagaccatcaccggacgcagcggcaaggcagctgcgtatgtacctgggcggatcagtacctgagtaacgtagccattgctcggcgcgcgaatgacagtctgctcaaggttatattttgcttcagtaagttgcgctcttaagctcacaatctggctttgctcgccgttaaccatactgtcgagctggctctggatctgcgcctgctccgccacgctgcctttcaccagcgcatcctgcgcgaggaaattttgccgcgcatcgtcgatgtcacgttcgctgaacggattcaccgccgcctggctgcctttcaagtaacgttgataatttttaaacagacggtcgcgctccgcactaacctgggtggtgttggcctgcgcttcagtgagctgcgcacgcagcgtctttatattatgcgtcgccgtcatcaggtcagcctgaagtctgtcaactcgcgcctggtaacgaaccgggtcgagcttaaaaagcacctcgcccttttgaataagctgattattcttgtcagtgacttcagtaacaattcccgtcacctgtggcgtgatagggatcgctatcactgccttttgcgcggtaaaagtgtaagggtggttgtagttcatcaacaaaatcaaaccactcaccagaaacacgcctcccagcgccgccgtcgccagcgtccactgatttaccggaatgcggaagattttaaagaccgcccacgccagcgccacgtaagttaaaacaatcaatagatccataattagatctccgggaacgtggaatagtcagtctttttctcggcggcgagttgatgctccagccgggaaattcggtcagaaagtgcggcgatttccgggtcagtcgctttctcctggctcgcaacatgactctgcataccccagccacgctccggttgatagagcgtcgcccagatccacagaaacggccagataacatgcagagtaaacaggctcacccagcccgccgtatgaatagcgtcggcatggggatggttgcgctttttggcaatcagataagggatgtcatgtatcgcgatgattccataaaaaatcaccagaaagacgaagatcagcactcccaacgcgaaatagtttagaaacatatctgcctcggattcacgtttatcagtgttgtttttgggctggcagccagaagggagtcaggctgatattttgacaataatccgggttcgcgattctcgccataacaccaaagaataatttttagaggtgatgagttgcttagttacataacgattgtatgacgaaggcataacatgctgtagatcacatcaggtgaacgccgtaagaaaatatcttgtgattcagatcacaaagattcaacaaaccatcaaaacaaaaatgtgacactactcacatttaaatgccatttttagcgaaaatcgccgccttgttgcttttttacacaagcgttttgtgatgaacgtcacgtcaattacctctctaccccctatatttatgtgattgatatcacacaaaaggccgtcgactggacagttaaccgattcagtgccagatttcgcagtatctacaaggtccggctacctctgccgccacattaacaaaaaacctcgggcttccagcctgcgcgacagcaaacataagaaggggtgtttttatgagttccgatattaagatcaaagtgcaaagctttggtcgtttcctcagcaacatggtgatgccaaatatcggcgcgtttatcgcgtggggtatcatcaccgcgttatttattccaacagggtggttaccgaacgagacgctggcgaagctggtcgggccgatgatcacttatctcctgccgctgctgatcggttataccggtggtaagctggtaggcggcgaacgtggcggcgtagtcggtgccatcaccaccatgggcgttatcgtcggcgcagacatgccgatgttcctcggttctatgattgcaggtccgctgggcggctggtgcattaagcacttcgaccgctgggtagacggtaagatcaaatccggttttgagatgctggtgaataacttctccgcaggcatcatcgggatgatcctcgctattctggcattcctcggcattggcccgattgttgaagccctgtccaaaatgctggctgcgggcgttaacttcatggttgtccatgacatgctgccgctggcgtctatctttgttgaaccggcgaaaatcctgttcctcaacaacgccattaaccacggtatcttcagcccgctgggtattcagcagtcccatgaactgggtaaaagtatcttcttcctgattgaagctaacccaggtccaggtatgggcgtgctgctggcgtacatgttctttggtcgtggtagcgctaaacagtctgcgggcggtgcggcaatcatccacttcctggggggtatccacgaaatctacttcccgtatgtgctgatgaatccgcgtctgatcctcgcagtcatcctcggcggtatgactggcgtgttcacgctgactatcctgggcggtggtctggtttctccggcatctccgggttctatccttgctgtactggcgatgacaccaaaaggtgcttacttcgctaacatcgcgggtgtgtgtgcggcgatggctgtctccttcgttgtctctgctattttgctgaaaaccagcaaagtgaaagaagaagatgatattgaagcagcaactcgtcgtatgcaggacatgaaagctgagtctaaaggcgcatctccgctgtctgctggcgatgtgactaacgacctgagccacgtacgtaaaatcatcgttgcctgtgacgccggtatgggttccagtgcgatgggcgcaggcgttctgcgtaagaaaattcaggatgcaggtctgagccagatttctgttactaacagcgcgatcaacaacctgccgccagatgtggacctcgtcatcactcaccgtgacctgaccgaacgcgctatgcgccaggttccgcaggcacagcatattagcctgaccaacttcctcgacagcggcctgtacaccagcctgaccgaacgtctggttgctgcccaacgccacacggcaaacgaagagaaagtaaaagacagcctgaaagacagctttgacgattccagtgctaacctgttcaagctaggcgcggagaacatcttcctcggtcgcaaagcggcaaccaaagaagaagcgattcgttttgctggcgagcagctggtgaaaggcggttacgttgagccggaatacgttcaggcgatgctggatcgtgaaaaactgaccccgacttatctgggtgagtctatcgcggtgccacacggtacggttgaagcgaaagatcgcgtactgaaaacgggcgtcgtgttctgccagtacccggaaggcgtgcgcttcggtgaagaagaagatgacattgcccgtctggtgattggtattgctgcccgtaacaacgagcacattcaggttatcaccagcctgaccaatgcactggatgatgagtccgtcatcgagcgtctggcacacaccaccagcgtggatgaagtgctggaactgctggcaggtcgtaagtaatccaatcccaccctctccacatggagaaggtggggttaattgcctgatgcgctacgcttatcaggcctacaggatgcatcacaatttgttgaatttgcacgttcttgtaggccggataaggcgcttacgccgcatccggcgctgcccctctcctcacggagagggtttgggtgagggaaaagcctcaccccagccctctcgggtaaaaacattgatgaaggttaatactatgaaagcattacattttggcgcaggtaatatcggtcgtggctttatcggtaaactgctggcagacgcgggtatccaactgacgtttgccgatgtcaatcaggtggtacttgatgccctgaatgcccgtcatagctatcaggtacatgtggttggtgaaaccgagcaggtagataccgtttccggcgtcaatgctgtcagcagcattggtgatgatgtcgttgatctgattgctcaggttgatttagtcactaccgccgttggcccggttgtgctggaacgtattgctccggcaatcgccaaagggcaggtgaaacgtaaagaacaaggtaatgaatccccgctgaacatcatcgcctgtgaaaacatggtacgcggtaccacgcagctgaaaggccatgtgatgaacgccctgccggaagacgccaaagcgtgggtagaagaacacgttggctttgtcgattccgccgttgaccgcatcgtaccgcctagcgctagcgcaactaacgatccgctggaagtgacggtagaaaccttcagcgaatggattgtcgataaaacgcagttcaaaggcgcactgccgaacatcccaggcatggagttaaccgacaacctgatggcatttgtcgaacgtaaactcttcaccctgaacacgggtcatgctataaccgcgtacctcggaaaactggccggtcatcagaccattcgtgacgcgattctcgacgagaaaatccgcgcggtggtaaaaggtgcgatggaagaaagtggtgcagtattgatcaagcgctacggctttgacgctgacaagcatgcggcgtacatccagaaaattctcggccgttttgagaacccgtatctgaaagatgatgtagagcgcgtaggccgtcagccactgcgtaaactgagtgctggcgaccgtctgatcaagccactgctcggtacgctggaatatggtctgccacataaaaacctgattgaaggtattgccgctgcaatgcacttccgcagtgaagatgatccgcaggctcaggaactggcagcactgatcgctgacaaaggtccgcaggcggcgctggcacagatttccggtcttgatgccaacagcgaggttgtatccgaggcggtaaccgcttataaagcaatgcaataatggtggaccaggcgcaggacaccctgcgcccgaataacagattgagtgatatgcaggcaacaatggaacaaacccaggcctttgaaaaccgtgtgcttgagcgtctgaatgctggcaaaaccgtgcgaagctttctgatcaccgccgtcgagctcctgaccgaggcggtaaatcttctggtgcttcaggtattccgcaaagacgattacgcggtgaagtatgctgtagaaccgttactcgacggcgatggtccgctgggcgatctttctgtgcgtttaaaactcatttacgggttgggcgtcattaaccgccaggaatacgaagatgcggaactgctgatggcattgcgtgaagagctaaatcacgacggcaacgagtacgcctttaccgacgacgaaatccttggaccctttggtgaactgcactgcgtggcggcgttaccaccgccgccacagtttgaaccagcagactccagtttgtatgcaatgcaaattcagcgctatcaacaggctgtgcgaagtacaatggtccttagtctgactgagctgatttccaaaatcagcttaaaaaaagcctttcaaaagtaagcaacgtctgcttactgcccctctacctgcttcggccgataaagccgacgataatactccagacgttgtagatataacggcacgctttcatcgggtattccggacggaatcgcgttacggggaggaagttttttcagatactcccggaacgcctggctacttgccatgaaatctacggctttatcgataagaagcggaacgttttcacctaatttgcccatgatgatatctccgtattaccccgcgccgggaatgcgcggccgccaattttagtttaggttcccggtaaagatgacattaaggaaaacgtgctgaatcctcaataatcatccgctgctgtttattatcttttttctatagatttcttaattaatcaacgaattgcgcagtttttgagcatgttaatgattacgttacagaactattacaatgtcattagttgtgaacaaagcacctggtcgcgcatactaggggctataaatttatctttatcagaagccatcacatgaaagaagtcgaaaaaaacgaaatcaaacgcctcagcgatcgcctggacgccatccgccaccagcaggccgatcttagcctggttgaagccgcagacaaatatgccgagctggaaaaagagaaagccacgctggaagcagaaattgctcgcctgcgtgaagttcatagccaaaaactgagtaaagaagcacagaagctgatgaagatgccattccagcgcgcaattaccaaaaaagagcaggctgatatgggcaagctgaagaaaagtgttcgcggactggtcgttgtgcacccaatgaccgcactgggccgcgaaatgggcctgcaggagatgactgggtttagtaagaccgcgttttaagaacacagtatctacagggtgattctgcacattcctataggccgagtaaggtgttcacgccgcatccggcaagataaggcgctctggatcaacaacctaagggcaattctctgatgaggattgcccttttctttaccagacatctccccccacaagaattggccctaccaattcttcgcttatctgacctctggttcacaatttcccaattaaaactcacatcaatgttgccaatacataacatttagttaaccattcattgtcattatccctacacaacacaattggcagtgccacttttacacaacgtgtgacaaggagatgagcaacagactcattacacgatgtgcgtggactccaggagacctgcaatgaatctctggcaacaaaactacgatcccgccgggaatatctggctttccagtctgatagcaagccttcccatcctgtttttcttctttgcgctgattaagctcaaactgaaaggatacgtcgccgccagctggacggtggcaatcgcccttgccgtggctttgctgttctataaaatgccggtcgctaacgcgctggccagcgtggtttatggtttcttctacgggttgtggcccatcgcgtggatcattattgcagcggtgttcgtctataagatcagcgtgaaaaccgggcagtttgacatcattcgcagctctattcttagcataacccctgaccagcgtctgcaaatgctgatcgtcggtttctgtttcggcgcgttccttgaaggagccgcaggctttggcgcaccggtagcaattaccgccgcattgctggtcggcctgggttttaaaccgctgtacgccgccgggctgtgcctgattgttaacaccgcgccagtggcatttggtgcgatgggcattccaatcctggttgccggacaggtaacaggtatcgacagctttgagattggtcagatggtggggcggcagctaccgtttatgaccattatcgtgctgttctggatcatggcgattatggacggctggcgcggtatcaaagagacgtggcctgcggtcgtggttgcgggcggcagctttgccatcgctcagtaccttagctctaacttcattgggccggagctgccggacattatctctagcctggtaagtctgctctgcctgacgctgttcctcaaacgctggcagccagtgcgtgtattccgttttggtgatttgggggcgagtcaggttgatatgacgctggcccacaccggttacactgcgggtcaggtgttacgtgcctggacaccgttcctgttcctgacagctaccgtaacactgtggagtatcccgccgtttaaagccctgttcgcaagcggtggcgcgctgtatgagtgggtgatcaatattccggtgccgtacctcgataaactggttgcccgtatgccgccagtggtcagcgaggctacagcctatgccgccgtgtttaagtttgactggttctctgccaccggcaccgccattctgtttgctgcactgctcagcattgtctggctgaagatgaaaccgtctgacgctatcagcaccttcggcagcacgctgaaagaactggctctgcccatctactccatcggtatggtgctggcattcgcctttattagcaactattccggactgagtagtacactggcgctggcactggcgcacaccggtcatgcattcaccttcttcagcccgttcctcggctggctgggggtattcctgaccgggagcgataccagttctaacgccctgttcgccgcgctgcaagccaccgcagcacaacaaattggcgtctctgatctgttgctggttgccgccaataccaccggtggcgtcaccggtaagatgatctccccgcaatctatcgctatcgcctgtgcggcggtaggcctggtgggcaaagagtctgatttgttccgctttactgtcaaacacagcctgatcttcacctgtatagtgggcgtgatcaccacgcttcaggcttatgtcttaacgtggatgattccttaatgattgttttacccagacgcctgagtgacgaggttgccgatcgtgtgcgggcgctgattgatgaaaaaaacctggaagcgggcatgaagttgcccgctgagcgccaactggcgatgcaactcggcgtaagtcgtaatagtctgcgcgaggcgctggcaaaactggtgagtgaaggcgtgctgctcagtcgacgcggcggcgggacgtttattcgctggcgtcatgacacatggagcgagcaaaacatcgtccagccgctaaaaacactgatggccgatgatccggattacagtttcgatattctggaagcccgctacgccattgaagccagcaccgcatggcatgcggcaatgcgcgccacacctggcgacaaagaaaagattcagctttgctttgaagcaacgctaagtgaagacccggatatcgccagtcaagcggacgttcgttttcatctggcgattgccgaagccagtcataacatcgtgctgctgcaaaccatgcgcggtttcttcgatgtcctgcaatccagtgtgaagcatagccgtcagcggatgtatctggtgccaccggtttttagtcaactgaccgaacaacatcaggctgtcattgacgccatttttgccggtgatgctgacggggcgcgtaaagcaatgatggcgcaccttagttttgttcacaccaccatgaaacgattcgatgaagatcaggctcgccacgcacggattacccgcctgcccggtgagcataatgagcatagcagggagaaaaacgcatgattatttccgcagccagcgattatcgcgccgcagcgcaacgcattctgccgccgttcctgttccactatatggatggtggtgcatattctgaatacacgctgcgccgcaacgtggaagatttgagtgaagtggcgctgcgccagcgtattctgaaaaacatgtccgacttaagcctggaaacgacgctgtttaatgagaaattgagcatgccggtggcactggctccggtgggtttgtgtggcatgtatgcgcgtcgtggcgaagttcaggcagccaaagcggcggacgcgcatggtattccgtttactctcagcacggtttccgtttgcccgattgaagaagtcgcgccagccatcaagcgcccaatgtggttccagctttatgtactgcgcgatcgcggctttatgcgtaacgcgctggagcgagcaaaagcagcgggttgtagcacgctggttttcaccgtggatatgccgacaccgggcgcacgctaccgtgatgcgcatagtggtatgagcggcccgaacgcggcaatgcgccgctacttgcaagcggtgacacatccgcaatgggcgtgggatgtgggcctgaacggtcgtccacatgatttaggtaatatcagtgcttatctcggcaaaccgaccggactggaagattacatcggctggctggggaataacttcgatccgtccatcagttggaaagaccttgaatggatccgcgatttctgggatggcccgatggtgatcaaagggatcctcgatccggaagatgcgcgcgatgcagtacgttttggtgctgatggaattgtggtttctaaccacggtggccgccagctggacggtgtactctcttccgcccgtgcactgcctgctattgcagatgcggtgaaaggtgatatagccattctggcggatagcggaattcgtaacgggcttgatgtcgtgcgtatgattgcgctcggtgccgacaccgtactgctgggtcgtgctttcttgtatgcgctggcaacagcgggccaggcgggtgtagctaacctgctaaatctgatcgaaaaagagatgaaagtggcgatgacgctgactggcgcgaaaagcatcagcgaaattacgcaagatagcctggtgcaggggctgggtaaagagttgcctgcggcactggctcccatggcgaaagggaatgcggcataatcgtttgcgccccctcaccctaaccctctccctcagggagaggggaccgttcggcgctgtatgtactccctcactctgaaacgacaccgcactctttttttctccctcgcccctccggggagagggccggggtgaggggaaaaggccgcactgctcaccaattttctgctatcctgcccccgcactaagggggcagtatgctaaacatcgtactttacgaaccagaaattccgccaaatactggcaacatcatccgtctttgcgctaataccggctttcgtctgcatatcatcgaaccgatgggatttgcctgggacgataagcgcctgcgccgcgcggggctggactatcacgagtttaccgccgttacgcgtcatcatgactatcgcgcgttcctcgaagcagaaaatccccagcgcctgttcgccctcaccacgaaaggtacacctgctcacagcgccgtaagctatcaggatggcgattatctgatgttcggcccggaaacacgcggcctgccagcgagcattcttgatgccctgcccgctgaacaaaaaattcgcattccgatggtgccggacagccgcagcatgaatctgtccaatgcggtgagcgtagtggtgtatgaagcctggcggcagttggggtatccgggagcggtattgagagattaattactgtaggccggatagatgattacatcgcatccggcacgatcacaggacattagatcccatccccatactcaaatgtatggttaataccgttgaaatgctggtccatatccatacttggcttatcgctgtctggtttaccgacaatacgagccggaacgccagcggcggtggtatgcggcggcaccggttgcagcaccacggaacctgcgccaatcttcgcgccgcgcccaacttcaatattgccgaggattttcgcgcccgcgccaatcatcacaccttcacgaattttcgggtgacggtcaccaccagatttacccgtaccgccaagcgtcacagattgcagaatgcttacgtcgttttcaatcaccgccgtttcaccaacgacgatgcctgtcgcgtggtcaagcatgataccgcgaccaatttttgctgccgggtgaatatcgacctggaacgtcacagaaacctggttttgcagaaagattgccagtgcgcgacgcccctgattccacaaccagtgaccgatgcgataggcctgcaaggcatgaaaacccttcaggtataacaacggggtactgtatttatcgactgccgggtcgcgggtacgcaccgcctgaatatcacaggccgcagaggcgatcatttccgggtcagcggcgtaggcttcttccaccacttcacggatagcaatagcaggcataattgggctactcagcttgttcgccagcatgtagctcagtgcactgccaaggttttcgtgcttgagtagcgtcgcgtggtaaaaactggccagcattggctcacagtccgccagcgttctggcttcggctttaatattgttccagacaatttccagttcttcacagctcattgcttactccacacgatgagataatgaccggcccgttctgcgcgggccgggtcatagcggtaacaaaggttccctggggttagtggctgctgcgctcgtccttgcgtgcacgacctagtaaagtcaatgctgcctcgcgcgcgttttttccgcaatataatacttgataaatttcctcggttattggcatttcaacgccgaagcgatgcgccagttcgcggacttctttcgtattgcggtagccttccaccacctgaccaatcttctcctgcgcgctttgtacatccatgccctgaccgagcatcatgccaaaacggcggttacggctctggttgtcggtacaggtaagcaccagatcgccaagccccgccatgcccataaaggtggcagggtcggcacccagcgccgcaccaagacggctcatttcagccagcccacgggtgatcagcgccgtacgcgcattcgcaccaaaaccgataccgtcggacatccccgcaccaatggcaataacgtttttcaccgcgccgccaagctgcacgccaatgaaatccggattgctgtaaacgcggaaacttttgccgcagtgcagcagctgctggagatcatcggcaaaggtctgatcggtgctggccaggctaatagctgtcggtaaacctgccgccagttctttcgcaaacgttgggccagagataaccgccagcggaatttgatcgcctaaggcctcacgcgccacgtcctgtaacagacgtccggtttccgcttccagccctttggtcgcccacaccagacgcgcatcaggacgcatcagtggtttaatctggcgcagcacttcaccaaagacatggctgggtacgacgacgagaatattacggctggctgccagcgcagtggcgagatcgctttcaagatggagcgtatcgggaaaaggcacatcggggagaaacgcggcgttacagcggtcgcgttcaagcgttgcgatatgttcagggtcatggccccagaggacaacctcgtggccatttcttgccagggtgatggcaagagcggtgccgtagctgccggcaccgatcacagtcatactagcattacgttggttcatcaggcatcctgatgttcttcagtaccttcgccagcctgctgctgcaaatagttcatgaacagcgcatcgaagttaaccggcgcaaggttcagttgcgggaatgtaccgcgggataccatgctggtgatgcactcacgagcatacgggaacagaatgttcgggcagtatgctcccaggcaatgcgccatctgggtgccttcgatacccgcgatggagaaaataccgccctgctgaacttcacacaggaacgcggtttcttcgcccaaagaggccgttacggtaacacgcagtaccacttcgtatacgtcatctgccagttgggaagatgccgtatccagatcaagtttaacttctggttgccaatctttctggaaaacgtgcggcgcgttcggcgcttcgaaagagatatccttggtataaatacgttggatctggaaagtcatttcagtgttgttttgttcactcatgtgtagaaaacccttaagtgttgtccttaaatactgcgcaatgtaatgccaacgttcacacgttatttcagcaggggatccagtccaccacgtgcatccaatgcatacaagtcatcacagccgccaatgtgctgtgcgtcaataaaaatctggggaaccgtggtgcgaccgctgcgtttgatcatctcttcacgcttggcggcgttgccatcgatcggcagctcctggaaactcacgcccttgctgctcagcagtgcttttgcacgatggcaatacgggcaggtttctttggtatagatttcaacattggccataaattagctcctgtttttttaccctgaaatttcatgttgcagggcggcagcaaaatggagtgtccccagaagcttataacaataagtcgctgggggcctaattgcagctaacggcctgcatcatgaaagacgacaggtaaattatttgccgcgcaccaaaggcaagttttcgccagcccagccagcgacgccttctttcagcacgaatacttgcgcaaaaccagctttcgtcagtgcgtttgcaggctcctggcactgcatgccagaaccgtctaccacgataaccggtttgtctttgtgcttctcaagctcaccaacattgttggctttgatttcgctcggcaacagattaatagaacctgcgatatggcctttacggaagtcatcacgctgacgtaaatccacaaccacagcgtcttctttgttgatcagacgcgtagcttcaccacgagtaatcaccttcactttgctggtcaggctcttaaacgtagtcacaagaaccgccaccagtaacgcgatccaggcgatactcagtatgggatgacggccaacaaattgcataatttcttgcatggggggtaacaactcccgacgtagtgattaaaaaaaccaggaaaggagtatacctgcgcggtgcggcaaatacagccagcgcgttaactggaatgcaattttgcggggcgcgacgaaaaaaaagcgtaaatctggcatcggcttgccgcgagcggtcgtatattttgatcttcagaggctattttatcgattcagctgtagtaaaattacgcaaattttgactcttgagtatgaggttgtcgcaatgttggtttctaaaaaacctatggtactggtgattctggatggctatggctatcgcgaagaacagcaggataacgccatttttagtgctaaaaccccggtaatggatgcactgtgggccaatcgtccgcataccctaatcgacgcttccggtctggaagtcggtctgcctgaccgtcagatgggtaactccgaagtaggccacgttaacctgggtgccggccgcatcgtgtatcaggacctgactcgtctggacgttgaaatcaaagatcgcgctttctttgctaatccggtgctgactggcgcggtagataaagcgaaaaacgcaggcaaagcggtacacattatgggtctgctctccgcaggcggcgtacacagccacgaagatcacatcatggcgatggtagaactggcagctgaacgcggcgcagaaaaaatctacctgcacgcattccttgacggtcgcgacactccgccgcgcagtgctgaatccagcctgaaaaaattcgaagaaaaatttgccgcgctgggcaaaggccgcgtagcgtccatcattggtcgttactacgcgatggaccgcgataaccgttgggatcgcgtagaaaaagcttatgacctgctgactctggcgcagggcgagttccaggccgataccgccgttgctggtttgcaggctgcttatgctcgcgacgaaaatgatgaattcgtgaaagcgaccgttatccgtgctgaaggtcagccagacgcggcaatggaagacggcgatgcactgattttcatgaacttccgtgctgaccgcgcgcgtgaaatcactcgtgctttcgtgaacgctgatttcgatggcttcgcgcgtaagaaagtggttaacgtcgatttcgtgatgctgaccgaatacgccgctgacatcaaaactgcggttgcttacccacccgcttccctggttaacaccttcggcgagtggatggcgaaaaacgacaaaactcagttgcgtatttccgaaaccgaaaaatatgcccacgttactttcttcttcaacggtggcgtagaagagagcttcaaaggcgaagatcgcattctgatcaacagtccgaaagtggctacctacgatctgcaaccggaaatgagctccgcagagctgaccgaaaaactggttgcggccatcaagagcggcaaatacgacaccatcatctgtaactatccgaacggcgacatggtaggtcacaccggggtgatggaagcggcggttaaagcggttgaagcgctggatcactgcgtggaagaagtcgcgaaagcggttgagtccgtgggtggacaactgctgatcaccgctgaccacggtaacgctgagcagatgcgcgatccggcaacgggtcaggcacacacggcacacaccaacctgccagttccgctgatttacgttggtgataagaacgtgaaagcggttgaaggcggcaaactttctgacatcgcgccgaccatgttgagcctgatgggtatggaaatcccgcaagagatgactggtaagccgctgttcatcgtggaataatccctccccatgaggggaaaggcgattaataccatgacacgggccgtgaaaccgcgcaggtttgcaatcaggcccatcatctacgccagcgttcttagcgctggcgtattgttgtgcgccttttccgcccacgcggatgagcgtgaccaactcaaatctattcaggctgacatcgccgcaaaagagcgcgcggtacgccaaaagcaacaacaacgcgcaagcctgctcgcacaattgaaaaagcaggaagaagcgatctctgaagccacccgtaagctgcgcgaaacgcaaaacacgctcaatcaactcaataaacagattgatgagatgaacgcgagcattgccaaactggagcagcaaaaagccgcccaggagcgcagcctcgccgcacaactggatgccgcattccgtcagggcgagcataccggtattcagctgattctcagcggtgaagaaagccagcgtggacagcgtttacaggcttatttcggctatctcaaccaggcgcgacaagaaaccattgcccagttgaagcaaacgcgtgaagaagtcgccatgcagcgtgctgaactggaagagaaacagagcgagcaacaaacgctgttatatgagcagcgcgcccaacaggcgaaactgactcaggcgctgaacgagcgtaaaaagacgctggcagggctggagtcttccatccagcaaggtcagcaacagttgagcgagctgcgcgccaacgaatcccgtctgcgtaacagcattgcccgtgcggaagccgcggcgaaagcgcgtgcagaacgagaagcacgtgaggcccaggcggttcgcgaccgccagaaagaagcgacgcgcaaaggcaccacctacaaaccgaccgaaagcgaaaaaagcctgatgtcccgtaccggtggtctgggcgcgccgcgtggtcaggcattctggccggttcgcgggccgacgctgcatcgctatggcgaacagctacagggtgaattacgctggaaaggtatggttatcggtgcttctgaaggtactgaagttaaagcgattgccgacggtcgggtgattctggctgactggctgcaaggctacggtctggtggtggtggttgagcatggtaaaggcgacatgagtctttacggctataatcagagcgcactggtgagcgttggtagccaggttcgcgcgggccagccgattgcactggtgggcagcagtggcggtcagggtcggcctagtctctatttcgaaattcgccgccagggtcaggcggtcaatccacagccgtggttgggaagataagttttgtttccatttcgtcgtaacgttcttgcatttgccgctctgttggcgctctcctcccccgtacttgctggcaaacttgccatcgtcattgatgattttgggtatcgcccgcacaacgaaaaccaggtgctggcgatgccttccgctatctccgtcgctgtattacccgatagtccgcacgccagagagatggcgaccaaagcgcataacagcgggcacgaagtgttgattcatctcccgatggcaccgttgagtaaacagccgctggagaaaaatacgctacgcccggagatgagcagcgacgaaattgagcgcattattcgtagtgcggtcaataacgtgccctatgccgtggggatcaacaaccacatgggcagcaagatgacctctaacctgtttggtatgcagaaagtgatgcaggcgctggagcgttacaatctttacttcctcgacagcgtaaccatcggtaatacccaggcgatgcgcgccgcgcaaggcactggcgtgaaggtgatcaaacggaaggtattcctcgacgatagccaaaatgaagcggacatccgtgtgcaatttaatcgcgcaattgacctggcgcgtcgcaacggtagcaccattgccattgggcatcctcaccctgcaacggtacgcgtgttgcaacagatggtttataacctgccgccagacattacgctggtgaaagccagcagcttgctgaatgaaccgcaggttgatacttctacaccgccgaaaaacgctgtgcctgatgcaccgcgtaatccgttccgtggcgtgaagctgtgcaaaccgaagaaaccgatagaacctgtttatgctaatcgcttctttgaagtattaagcgaaagcatcagccagagcacgctgatcgtttacttccagcatcagtggcaaggctggggcaaacagcccgaagcggcgaagtttaacgctagcgcaaattaattagcgcaaattaaaggcgctacgcgtaatgcgatggtggctccgcgttttgtcgcgccattgccataagcggaaagaccacagtaacgcctggtaaccgaccttcacgctgcgcacattggtaatcaggcgcttatacataccggaagtaaatatctcggcaatcatccgttggcgggtaagaatatccggctctttgcgcaccgcatggcaaacacgcaatgcctcgtaagttatttgctgatgaaattccggataaatcataattttgtcggcataatttcgatttaatttctccagcaggcgggtaatcttaatatagtgacgttgataattaaggtttttattcccttgtctatgcaaccgactcacactcgtattatgcagataatatttatataaactttgctcggtatatcgcgcacgcagcgcgttaaacatgaattctgttgtccagacaatatcctgatgatgtaatccggcaataaatttaatgttatttttaacaataacatcacggcgataaacccccatccagacaacgtgagtccaacggcggctagaaagccccatccgcagccagtccgggccggttaatacgccggtactgcgaaggcgatcggtggggatggattgccaggtttctcccgtttcacgaaaacaccagtcagcgttgcactgcgccacgtcgaggtcgtcctctaacgccatggtcatcagcgtttcgtacatggtgggatagacttcatcgtcagcatcgacaaaagcgacatatttgcccgttgccacttcaatcccacgattacgcgccacgcttgcgccagcattcgcctgatgcaacaaacgaacgtgcggatagttttctgcgtaatactttgctatttcaacagaattatccgtactaccatcgttaataataatgatttccagagcagtccaggtttgcgtaattaaagattccatacaagtgcggaaatcatcgcccgcattatataacggaataataacactaagtttattggtgctgttcatcataaattaccgacgacctctgaagttatcctgacgttttacaggctttgtattaagaaactattaagcctgtgagatattatttttacaggtgagagagtcacttcagggtagagagataatgagagcagctatataagagatcagcacaattacgaactctttattacactgacaggattttacatatttaacagattatcctcagataaaagggctggaataccagcccttgttcgtgttaatcccagctcagaataactttcccggactggccgctacgcatagcgtcaaagcccttctggaaatcatcgatagagaaacgatgggtaatgatcgggctaagatcgaggccagactgaatcagcgccgccatcttgtaccaggtttcaaacatctcacgaccgtaaatacctttaatgaacaagcctttaaagatcactttggtccagtcgatagacatatcagacggcggaatacccagcatcgcaatacggccgccgtgattcatggtgtcaagcatggtacgaaacgctggcggcgcaccggacatttccagaccgacatcaaaaccttcggtcatgcctaactccgccatcacgtcattgagattttctttggcgacgttaaccgcacgggtgatacccattttacgcgccagctcaaggcggtattcgttaacatcagtgatcaccacattgcgtgcaccaacgtgtttcgccaccgccgctgccataataccaatcgggcctgcaccagaaaccagcacatcttcgcccaccagatcaaagctcagcgcggtatgcacggcgttaccgaagggatcaaaaattgcggctaagtcatcggaaatattgtcggggattttgaaggcgttgaatgccgggatcaccagatattcggcaaagcagcccgggcgattaacaccaacgcctatcgtgttgcggcacaaatgggtacgaccaccacgacagttgcggcaatgaccacaggtgatatggccttcgccagaaacgcgatcgccgatcttgaagcctttcacttcctgaccaatacctaccacttcaccgacatattcatggcccacgaccatcggcaccgggatggttttttggctccactcatcccagttatagatgtgaacgtcagtcccgcagatggctgttttacggattttaatcagcagatcgttatgcccgagttccggtacaggaacgtcggtcatccagatgccctcttccgctttcagtttggataacgctttcatctcacatcctcaggcgataacgcccagttgtttaccaatacgcgtaaatgcttctactgcacgcgtaatttgctcaggggtatgcgccgcagacatctgggtacgaatacgcgcctgacctttcggaacgaccggatagaagaaaccggtaacgtaaatgccctctttttgcagctcacgggcaaatttctgcgccactaccgcatcaccaagcatgaccggaataatggcgtgatcggctcccgccagggtaaagcccgccgcgctcatttgctcacggaactgacgcgcgttcgcccacagacggtcacgcagttcgctgcccgcttcgaccatctccagtactttgatggacgcggcaacaatggccggtgccaggctgttggagaacaggtacggacgagaacgctggcgcagccactcaaccacttctttgcgcgccgcggtataaccaccagaagccccgcccagcgctttaccaagcgtaccggtgataatatcgacccggcccatcacatcgcagtattcatgggaaccacgaccattttcaccgacaaaaccgaccgcgtgggagtcgtctaccatcaccagggcatcatatttatctgccagatcgcaaacgcccttcaggttggcaatcacgccgtccatactgaacacaccatcggtggcgatcagcacatgacgcgcaccggcttcacgcgcttctttcagacgtgcttccagctcctgcatatcgttgttggcatagcgatagcgtttagctttgcacagacgcacaccatcaataatagacgcgtggttcagtgcgtcggagataatggcgtcttccgcacccagaagcgtttcaaacaggccaccgttagcatcaaagcaggaagagtagagaatcgcatcttccatccccaggaaggccgccagtttttgttcaagctctttatggctgtcctgagtgccgcaaataaaacgcacgctagccatgccgaaaccgtgagaatccattcccgcctttgccgccgcaatcagatcaggatgattcgccagcccgagatagttgttggcacaaaagttaatgacgtggcttccatcagccacagtgatatctgcttgctgcgcagacgtaataatgcgctcttctttaaacaacccttccgcccgtgcggtttccagatcgttggttaactgctgataaaattctccacgcattgcgattctccagacagggcaaattccagcacatattacccaaacttataggtcgcgacgagataacgcgttaacacttctgcaaaattcaggataaataacgtgtaacttgatgtctctcaacacctacagatagtagaaaaactgtacagttttggctgggcataatgatgattgattttactgcattgatataaaaagaaaaaatgatgccaaagcatcatttttcctatctcagttggtatcaaaacgctacccactaatggagggaaacttattttctactaaggaaaattctcagcgcctgcatttttgcccctaaagtgttactcctgaagcagcgaaacaaatcgaaccattttcctctccccagatagtttaggttgaagagatcggggcgtttgtaatagcacatgacaaaaatgccctggtcatcgtccacaatgttattatttagtgttattttttgactttccagaactaatttatagaattctttccatttatgctgactaccaacaattgcgcccccaataatatatacatgattgccaatcatgaaatcaaaaacctgttgttgagatgtgacagtaagccctttttttatagtgaaaagatgcatcttactttcatcaaatgggaaatcccaaattttcaatcctcgagttacatttggcttatggcaatagccaaaatctatccacgcaacaagaggcgttttcactaagcccatgttgatagctttatttacaaaataggccttaaggttacataccaaaacatactctggactccagtactctgggttttttaattgtcgaggctcaagtctatttgtaaagctctcatctttttgaattttttcgatacgacttctgatatatctaaatttcttttttatatcgataacgataaccgttgttggttttccgttgcgaatcgcttcaacccttggtttcaaatcgggagaagtgaaaataatcatctcattttcaagtgcggccagacgctcaaagtaactaaaataaacatcaacactacgagctagtttttcacggaaccctttattagcagtccaatcccctctaccaatgtcaaaatatgcagtgataattgtggtggaacttttcattactaataagaccattaatataaaaaaagaattatatcataaatattaatagaatgtatactgtatattatccattcaaatgcttccgttatttatcatacatcggaatattgatactaaagcactattcacatgcaaaaccaacatccgccatgaaggactagctaaaacccaaactagtttgttgcaattagcatccttgcacctctatgtaaagggctgaagggattcggatgtgatggtatgattacagacattcgtgtctgagattgtctctgactccataattcgaaggttacagttatgatcatcgttaccggcggcgcgggctttatcggcagcaacatcgttaaagccctgaatgataaaggcatcaccgatattctggtggtggacaacctgaaagacggcaccaagtttgtgaacctggtggatctgaatatcgcagactatatggataaggaagacttcctgatccagattatggctggcgaagagttcggcgatgtcgaagcgattttccacgaaggcgcgtgctcttccaccaccgagtgggacggcaagtatatgatggataacaactatcaatactccaaggagctgctgcactactgcctggagcgtgaaatcccgttcctgtacgcttcttccgcagccacctacggcggacgcacctccgactttattgaatcccgcgagtacgaaaaaccgttgaacgtctacggttacagtaaattcctgtttgatgaatatgttcgtcaaatcctgcctgaagcgaacagccagattgttggcttccgttatttcaacgtttatggaccgcgtgaaggccataaaggcagcatggcgagcgtcgctttccatctcaacacccagcttaacaacggtgaaagtccgaagctgtttgaaggtagcgagaacttcaaacgcgacttcgtctatgtgggcgacgtggctgatgtgaatctgtggttcctggaaaatggcgtttccggcatcttcaatctcggtactggtcgtgcggaatccttccaggcggtagctgatgctacgctggcttatcacaagaaaggccagatcgaatacattccgttcccggataaactgaaaggccgctatcaggcgttcactcaggcagatctgacaaatctgcgcgcggcgggttacgacaaaccgttcaaaaccgttgctgaaggtgtaacggaatacatggcctggctgaatcgcgacgcataagagctctgcatgaaaatactggtgatcggcccgtcttgggttggcgacatgatgatgagccaaagtctctatcgcacgctccaggcgcgctatccccaggcgataatcgatgtgatggcaccggcatggtgccgtccattattaagccggatgccggaagttaacgaagctattcctatgcctctcggtcacggagcgctggaaatcggcgaacgccgcaaactgggtcatagcctgcgtgaaaagcgctacgaccgcgcctacgtcttacccaactccttcaaatctgcattagtgcctttcttcgcgggtattcctcatcgcaccggctggcgcggcgagatgcgctacggtttactcaacgatgtacgcgtgctcgataaagaagcctggccgctaatggtggaacgctatatagcgctggcctatgacaaaggcattatgcgcacagcacaagatctgccgcagccattgttatggccgcagttgcaggtgagcgaaggtgaaaaaagttatacctgtaatcaatttagccttagtagtgaacgtccgatgattggtttttgcccgggtgcggagtttggtccggcaaaacgctggccacactaccactatgcggagctggcaaagcagctgattgatgaaggttatcaggtggttctgtttggcagcgcgaaagatcatgaagcgggcaatgagattcttgccgctttgaataccgagcagcaggcatggtgtcggaacctggcgggggaaacacagcttgatcaagcggttatcctgattgcagcctgtaaagccattgtcactaacgattctggcctgatgcatgttgcggcggcgctcaatcgtccgctggttgccctgtatggtccgagtagcccggacttcacaccgccgctatcccataaagcgcgcgtgatccgtttgattaccggctatcacaaagtgcgtaaaggtgacgctgcggagggttatcaccagagcttaatcgacattactccccagcgcgtactggaagaactcaacgcgctattgttacaagaggaagcctgacggatgcgggttttgatcgttaaaacaagcagcatgggcgatgttctccatacgttgcccgcactcactgatgcccagcaggcaatcccagggattaagtttgactgggtggtggaagaagggttcgcacagattccttcctggcacgctgccgttgagcgagttattcctgtggcaatacgtcgctggcgtaaagcctggttcagcgcccccataaaagcggaacgcaaagcgtttcgtgaagcgctacaagcagagaactatgacgcagttatcgacgctcaggggctggtaaaaagcgcggcgctggtgacgcgtctggcgcatggcgtaaagcatggcatggactggcaaaccgctcgcgaacctttagccagcctgttttacaatcgtaagcatcatattgcaaaacagcagcacgccgtagaacgcacccgcgaactgtttgccaaaagtttgggctatagcaaaccgcaaacccagggcgattatgctatcgcacagcattttctgacgaacctgcctacagatgctggcgaatatgccgtatttcttcatgcgacgacccgtgatgataaacactggccggaagaacactggcgagaattgattggtttactggctgatagtggaatacggattaaacttccgtggggcgcgccgcatgaggaagaacgggcgaaacgactggcggaaggatttgcttatgttgaagtattgccgaagatgagtctggaaggcgttgcccgcgtgctggccggggctaaatttgtagtgagcgtggatacggggttaagccatttaacggcggcactggatagacccaatatcacggtttatggaccaaccgatccgggattaattggtgggtatgggaagaatcagatggtatgtagggctccaagagaaaatttaattaacctcaacagtcaagcagttttggaaaagttaagtagtttataaaggtaaaacatgctaacatcctttaaacttcatagtttgaaaccttacactctgaaaagtagtatgattttagagataataacttatatattatgtttttttagtatgataattgcattcgtcgataatactttcagcataaaaatatataatatcactgctatagtttgcttattgagtctaattttacgtggcagacaagaaaattataatataaaaaaccttattcttcccctttctatatttttaataggcttgcttgatttaatttggtattctgcgtttaaagtagataatagcccatttcgtgctacttaccatagttatttaaatactgccaaaatatttatatttggttcttttattgttttcttgacactaactagccagctaaaaagtaaaaaagagagtgtattatacactttgtattctctgagttttctaattgctggatatgcaatgtatattaatagcattcatgaaaatgaccgcatttcttttggtgtaggaacggcaacaggagcagcatatagtacaatgctaatagggatagttagtggcgttgcgattctttatactaagaaaaatcatccttttttatttttattaaatagttgcgcggtactttatgttctggcgctaacacaaaccagagcaaccctactcctgttccctataatttgtgttgctgcattaatagcttattataataaaagtcccaagaaattcacttcctctattgttctactaattgctatattagctagcattgttattatatttaataaaccaatacagaatcgctataatgaagcattaaatgacttaaacagttataccaatgctaatagtgttacttccctaggtgcaagactggcaatgtacgaaattggtttaaatatattcataaagagtccttttagttttagaagtgcagagagtcgcgctgaaagtatgaatttgttagttgcagaacacaataggctaagaggggcattggagttttctaacgtacatctacataatgagataattgaagcagggagtctgaaaggtctgatgggaattttttccacacttttcctctattttagtctattttatatagcatataaaaaacgagctttgggtttgttgatattaacgcttggcattgtggggattggactcagtgatgtgatcatatgggcacgcagcattccaattatcattatatccgctatagtcctcttactcgtcattaataatcgtaacaatacaattaattaagaataaacaagtttaagaagtgagttaaaactcacttcttatctatacaacttaatctctttacactattagttaaagtttcagtatcgatatcttttaccgtatatgttggggatactatttgtatagatttatgatgattcggggaccaaattaaatggctgggatattccggagtacgactattagggtaaaatgcaagcgttggtttatgataagccgcagcgatatgaacaagagctgtatcaacagaaatgacaaaatcactatacttggtcaacgcaacggtataaataaactcatcaaatggtagtgtttcgatttcaagtattggtattgtcaataaatcttgcggtaacccggtaaatataatccgataattttcaaagtgtgttttcacttcttgatatataacttttatttgctcaaacgtaagacggcatattttttttgcacctaatggattaataatgactattcttgtatctccaataaattcttttattttatcttcaacatctactggtaaatgcaagtcgtagttggtggaaaatttaccctcaccataaatatgcttcagtatttctattgctcgtgtactcatatgttcttttaaacattcatcgtggggatggtaaaaactatagtaacgcttataccaatgatcaaaacccagaatgtaagaatcttttaaactacttaatattaagctatgcttaaaactgggcatagtttcaaaggggtctaatacaatatcgaactgtaaatcccgcagatgcttacatagagtaagcatttcaagaaaaccggtactttctttaatacagaactcaaatatatttttattattagagagaaattccccaccctttctatttgtgagaagagttattttaacccctttactataaagttcacgataaatgctacttaatacaattagatcaccaagtttattattatcatgaataataaggcaacttttaacttgtgctggatctgtaatttgattatttattttattacgaaataaaaaagaaaggaaattaatcttgattttgtttatataaaatcttttctttttgtgaaaagttcctaagcgcatttttataccatattattttagtttcaggatgattaattagcataagaatcggtactagttctatattgcattttttttcttgtcatatctttactttcttctgcactgatgtcttgaagtttaataaatggaattacatcgtaagaaatagctgtatcatcacttaaattataaatattaatatcttttacattatcatgcataaaacgaaaaaatggcaatattttgaataaatccctacttaattcgctgggcatgggatttttattctcatcatagaaacgagaacagctacccgttaaatcaagaccagaacaaataatccgcgcatacttaagactatatgcgatttgaattgcagcaaaggcaatagtatggcaactgcaataaccaagactaatgtccttgcaaaatccaaccagacgaccttttttagacaacggtacagagatcagcagttctttgtgaatctgtctcaaaatattaaatttaatcttctttataaaaccacctttttcccgacggtaaaaggaccgtaatacgaggcagttctggaggatataaagtttatcttctttggaagcgtgttcataaacgtcaacgtttactatggtataacgacttctctggctaaatttataaaaatcatcacgacgctgatgtaaaaatcggacatctgtaagtacatatataaaaggaacgatattattacttaacagatattgcgcagaaccattgacagcaataatatcctttgttcgtaatacactcaaaggtgttttttggcttgtagggccgctaagaaaaataataacatcatcagatattttattttcaatcaggttttcaacatcttttttgtcaatgtatctaatattcttcatgataaacctgtgaaataaataactccgcttaaaactgtcctggtgaagacatgtaattgtgggattttttttagcgcgctggtttccctttcaaacgccgcataaaattgcgcatttttttacgatatactaaaagataatagcctagatctctaatctcatttttaataccgtaatgacgctctaagtcaatacgatctttcgctttacgctgcgcactagcacgctttccggagagatcgataattcgaacctcaccattttttataatgaagttaccacgatgggggtcgccagaaaccatgccatgttgatgtaaggcattaatactttgctgaattttattttttagcgcatcatcaatatcgggcatatcacacaactctatgccatcaatatactcgatgatcatgatataagtatggacaaaacgtaaggttttccgttcagccaataaataaaagtcattgagtgtatttaacccttcatttcgtactttttgggtttgctcaaaaaggcgttcgtaataatcaccttttaacagagacttaaagaaacgttcgttacgcttaactttcggagaaaaaaccttaagaatcaatttaccgtaatcggtatcaataagcataacttttgtatcatcaatagaacgaaaaaccttgatgatatttatattataagacaagaagtcatttaatacattgaggtacttactattgttttcatcggtaaaaacaaccaagtctttgatcttgctcttctgaatcataataaaccagttaaatgttatttacggtaatattttcggcaaagataacagactcctgctataattcctgagatataatgatgttgcactaaaagatgtttatatcttttttaaattcaataattgatttcgcatctcgtggagagtcatctttccagggggaattttctaaagctattttatagtattttaccgatggataaattgcccatttgtgccacggtttagttgcacctgtataatgaataagaagagtactttctgtaatcagctttttatagttttgatgtgttttgtcttttaattcacttttaattgtataaattgtattgtactcacgaggcaaaaataatgtcatccctttcagtaagacattcataacatcctgatcagggtatttataaacattatctttactcataagaatagacaacgctttttctgttagttttgcgtcagcccatttttttaagtctaaataaacgacaccggaattaaagtactgcccaagtaattcaggatcagacaacctggataccgccttttcttgcattggctcaacatctttaacaacagcagcaaccgctccatttaaacccagatgtaatagttggctaatatcgcctttacaaacaacatctgcatcaagataaagcaaacgatcaagcgttaaacccaataattgaaatgcaaataaacggaagtacattgctcttgaccagacctgtgtacaaggcaagcactggagcttatcagtgttaattctatataacgtgattcttaattggttttgctctgcaagctttgcaattttttgaaaaaaaccatcattataaacatcagcaataatataaaaatcaagattaatatgtcgattatttaggacaattgatgtgatggaaacacctacaccatcaagataattagcatcgacaccataggcaacatttaaacattcagaagtatttatattagctagccgaaaatcccaggctttaactttatctatctctatggcaggaaatgagtccacaatgctacccttatatcattactttatagtttcccagttttaatgctttatcttttcaataaaataaaaaagatagttgctaaatccttttagatatctatgctttttaagcatatgttttgcgctatatcttaattgattgctattgttcggtttcagcaacgccgtattcttccatgggctagcattttttgcctccataaaggcttgacttacaggataatcccaggcccaatcatgccagggcttggttggcccgatataatggataaaaatagtatcgttggttactgggtttataaagctttctttgagttgataatttaagctgaactgggtgttatatttaatatcagcgaaaataagtttatccgccagcaacatatttaacacatcctgatcaggatgtgttatttttttgattatttctggctcatttagcattgcaatagctcgtgcagaaacctgctgagccgcccattgggcagtattaatcaataaaaaaccggagttaaagtaacctttagcaattcccgcaacacctaagctatgggcgcgtttttcccaccagtcagcttgcccttctgtaacaaccattgcgactttatcgtcaggaaaactgaaattaattagtggctcaatagtcccctgacaaatgatatctgcatccagataaaggactttaggcgccttattaataaagtaatctgcaataacaaaacgaaaatatattgcatgagtccaattcttagtgctaggcaaactgcgcagtcgatcaccattaatcagatatattttaattctggttttatactgcaacgccagggcatcaaaatacttacgatcatcatcaccaaaataatcagtaaaaatatggaaacacaatcgacttccttcattatattttaatatactagcaatgctaattccgcaaccaaatagaaagtttttgtcagttccataagcgatgtccagacaaagattttctgtttctactttatgatcataatcaataacactattaagaaactcagtttcctggaaaaacacctgctgcattatttcctccgggaaatagcagaaataattaccttatgtaatctatcgtaatacttgctttggtaaaattcatcgatgctcgcaggaattttttcatgttcgatatgaatttcacctgctatatatttatttagaagagttacaaaaccagcaatatctcccggttgatacagatggccattgacatcaggttgaataatgtcagcaggcccggagacacaatcggcactgatacaaggaatcccccagctcaaggcttcaagtagggtcattgggaaaccttcaaaagaactcgtgagcaataacgcactcactttttcaatatcttgctggaccaattcccagggatattgttgccaaccataccagacaattcgatcatcaatatttaattctctaccataagcctggcatttttcgaaatcggagccatcacccaatacatggagtttccagttacctttcgcttgacttaagccatcaagcaggtctttaactcttttctggccttcaaatttcatacgcccaacataaataaacgttgccgtttcaccttcctcgggcgcgggaatgacactgtctttagtttcgacgggattaaaaataacatttatcgtgctttctgctacacctcgattaatcatttgctgtttaatgccagagctgattgctaaatgatagtcggcacaggtgatatattcagcatgttttttgtgatctaaagaaaaatgtggccaactaaatactggcatatcaattccactttttttacgtgcttttgcggcaaacaggcaggagatcacatcaatacaaataacgatatctggttggtactcctgaagccatttacttagagcatgaatatgtttcgcccgacgcaaaaaacctaaacgaatattggaaaaactacaactgtatttaataccttccagccatcccttatccattttgtcattacgacaaaagaaaaacatttcactttggatatgttgttgcctgaaggtagtaataacatcacggatgacagtttccatgccgccaaatccagaaacagcttcgccgataaacgctattttcatagaaactctcattaattgagtaaaactcactgttttaacggttttatttgtctataaaatcagaaacaatcgtactcatcattttatctggactgaatttatataaactatcataatccattggtttaacagaactgttaataaaatactctaacttatcccaatcatcatgacctattataaaaaagcgagattcactatagatttcactaccaaatacatttatattattagtaattaattttttattgaaaaatagtgcctcaagtatacgaagagtccagccagattggttttctttggttatatcaacaattatattagcatttaatgttcttctaatattctcttcataagatatttgtttttcaatcaaatacttactagtcgtagaacttgtcttatctttgacaacattaaaatctagcttacatcctagtgttgttaatctctcggctaactcattaattatttgaagacgccctttatcacgaccaaggaaaaaacatattggctggctgttatttttgtcagataaactataatttctaatttcatccattcctataggaaaaaattgttctattgccttgatcttttcattccctataaatctatgctcaaaatcatatataatatcgaaataattcgcgttatcaagaataaaatcttcgccaacagtatttcttagaagcaaaactttatgacagttaatattttttaatatttgtttattgatacctttattaacaacactgtcattaatgataattatgtcatcttttttaatatcattgaggtaatgcttgatgaataatcgccccagccatgcattatccatccctattttacttatttttttattaatccagttatatttttttggtgttgttatattttttatcttgtacttttttttcaggtactgaatcatttttaattcataatctgcaacccaatttataaaataaatagtcataataaagttagttccagtacatactaataaatatttttataatcctttgcgttgtgttcgctctttaatacgctcggccttaacgcttgccatgttcaataaattctgttcaagagacaatattttgcgtaaaggcatcccaaaataaaccttcataaatcgccagatatctctttgcgtcaggccaatattcatactactgaaatataaaccaatcaggtctttatcgcgccagcggcgcggtacttttgcacgtatctgtgcccgatgcagatcgataacactaatttttaattcatcttcccggccagtaaatggcaaatgaagcaaaaagtggcaaatgtaacagtcgcggtgatttatccctgcagtatgcattttacgcaccatagttgctacacgtgcgatcagcatacgcttaacacgtatatcaggcgggttgactgcccaatcggcacaataatcttcaaggctaattgtgggagtgagatcttcggtaataataaaacttgcgcgagttaatggatttaaccctttttcgccaaacccaatgcccttcattgtatcaacgccaacatcactcaggcgatgaatagcgtgccactctctgtctgcgcccaaaacgggcatccgcaaactgagtagattttttataatctcttttaatgtcgtccccttgtgccatttaagaaaatagcttttcccggacagttcaaagcgtaatgtacgacgagtctccagttcacgaaagacctcgccgttcagttttttgacctctgcaaaagcatctttaccacgccaaagtgtggcaagcggctcttttaattcaaccatctaaaccacctgtaatgatatccgcggctttttctggcaagctatacaaatcctgagtatcggcataatggcgagcattctccgcccaggccattcgcaatgggctctgagttaacgctttacgtaaaacttcatttaattgttcctgagagaaaggttcagcgatgaccgttccacaattggcatccgcaatataatgcgcgtacccacataccgctgttgttaaaacaggtaacccagcagtgatcgcttctagaagaacgatacccgcggcttcctgataagcgggatgcagtaataaatcagcggctgccattaattcactcacatcattgcgaccggagaagaaatgcacattgctccgcacgccgagtttttctgccagcgcttcaaattttcgcggcttatcctgaccaacaacaaataaaagcgtattgtgacgtaaactttccggtaagcttgccaaagcttcaatactgcgatctacacctttacggccaaaatcacttccaacctgcagtaataagttttgttgctcttttatgccatttttctggcgataaatttcacggctgtttgggatttgctcactgtattttctgtccggataaataccgggaggaagaatttgaaaacgttcaggttcagtttgataatgcttctggaaatcggcgatttgcttatcggtcagcatcataagtttcgtgcttttaccctgctcgaaagtcgctcgctcaaatgcggcataatggcgatatcgacttgttaaacgatataaaaaacctttttcttgcgcaactttctcggcgtaacaaacatcagcggcaaaataaacatccaggccaggcatcttattaaacccaacaacgcgatctgcgggatgctctttgagatgattttgtacccaggcataatattctgcattgcgtccatggttggtatgggacttaactggcacctgaataagctcaaatgctttcgggcaatcgccttcccagctctgtgtatatacccgaacatggtggccccgtgcggcaactgtacttgcaatgcgcataaagtcacgttgaagcccaccaaatggaaaatatttatataaacaaaacgccacgatcataattgtgcattcctgtcagcactaggggcatcttctggcaacagcttttccgtagcggcgatcacatcctccgctgggataacagaaagatattttttgttgcggtcaagttcatgccgggtcggcattttctgataattccccgcccagaattgaataatattctcggtccagggacgccagaatacgtgatccgttgcaccaaatagactaatgactggcgttttcactgccgctgcaatatgtcccggcgcagaatccacaccaataaaaagcactgcatgatcaattaatgcacccagttcaggaaaacgtgttttacctgcaaggccagtaatgggttttgtttcgcaacctcgtgcaatctcatctacacaagcgagatcatctgcgctgggcccacaggttagcacaacctgatagcctcgctgttgcagcgcatcgataaccttagaaaatttatcgttatcccaacacttaaatatctgacgcgctgtcggttggatgacaacataatgatcttttacgcccagggcatctaattcccggcgcatcttcttccagcaatcttcggcgtaactcattgttgtgtcggtgtagaaatcggtaatacctaatggctcaaggacgcttaaattacgctcaacaatatgtgtaccgtgtattggcgctaagtgtgtgaagctttttttccaaataccatgctgccgatgaccataaagttggcttattttcatccgtgcaggtaaacaacgtaccagcagcgccaccatccactgatccgtaagattaatgaccaggtcataattattcgcacgcagagtttttatcaagctaagcacatttttaattttatcgaaagttcccgcacctttattgcttatcccatagagcgcattaatttccgggttttcagacaaaatagggatggtgtcctgataaagcagcatatcgatttttgcatcaggataattctgcttgagcgtactgatgacaggagtagttaataacatatccccatgatatcgcatctttatgaccaggatttttcgaaatggcttttccactagcgactcttttgtgtgattgtctggttaagttaagcagaaaaaagcacgctaccgccccaggctcaacagctacctgaatactgataacgcacttactttgacgtgctagtgtatcatttctttcgcagcaatccgacccgaatgatttttatacacaaaatatactttaatcataaaaatcaaatagataaaaaatagcatttcgataatgtcagtacggcctatgtagatttgaaaatggggccgagtttcaatgaatcgcataaaaatacaaaaaaaatgaagatgtagcggcagatcagaccaaactgaagctatttaagtcaaaaacgggaaaagtaatggtaaagccacagctaaatacatagaatccccagcacatccataagtcagctatttactatgctcgaattgctttacaccgcccttctctaccttattcagccgctgatctggatacggctctgggtgcgcggacgtaaggctccggcctatcgaaaacgctggggtgaacgttacggtttttaccgccatccgctaaaaccaggcggcattatgctgcactccgtctccgtcggtgaaactctggcggcaatcccgttggtgcgcgcgctgcgtcatcgttatcctgatttaccgattaccgtaacaaccatgacgccaaccggtagcgagcgcgtacaaagcgctttcgggaaggatgttcagcacgtttatctgccgtatgatctgcccgatgcactcaaccgtttcctgaataaagtcgaccctaaactggtgttgattatggaaaccgaactatggcctaacctgattgcggcgctacataaacgtaaaattccgctggtgatcgctaacgcgcgactctctgcccgcagcgccgcaggttatgccaaactgggtaaattcgtccgtcgcttgctgcgtcgtattacgctgattgctgcgcaaaatgaagaagatggtgcacgttttgtggcgctgggcgcaaaaaataatcaggtgaccgttaccggtagcctgaaattcgatatttctgtaacgccgcagttggctgctaaagccgtgacgctgcgccgccagtgggcaccacaccgcccggtatggattgccaccagcactcacgaaggcgaagagagtgtggtgatcgccgcacatcaggcattgttacagcaattcccgaatttattgctcatcctggtaccccgtcatccggaacgcttcccggatgcgattaaccttgtccgccaggctggactaagctatatcacacgctctagtggggaagtcccctccaccagcacgcaggttgtggttggcgatacgatgggcgagttgatgttactgtatggcattgccgatctcgcctttgttggcggtagtctggttgaacgtggtgggcataatccgctggaagctgccgcacacgctattccggtattgatggggccgcatacttttaactttaaagacatttgcgcgcggctggagcaggcaagcgggctgattaccgttaccgatgccactacgcttgcaaaagaggtttcctctttactcaccgacgccgattaccgtagtttctatggccgtcatgccgttgaagtactgtatcaaaaccagggcgcgctacagcgtctgcttcaactgctggaaccttacctgccaccgaaaacgcattgaggttgttatgcaaaaacgggcgatttatccgggtactttcgatcccattaccaatggtcatatcgatatcgtgacgcgcgccacgcagatgttcgatcacgttattctggcgattgccgccagccccagtaaaaaaccgatgtttaccctggaagagcgtgtggcactggcacagcaggcaaccgcgcatctggggaacgtggaagtggtcgggtttagtgatttaatggcgaacttcgcccgtaatcaacacgctacggtgctgattcgtggcctgcgtgcggtggcagattttgaatatgaaatgcagctggcgcatatgaatcgccacttaatgccggaactggaaagtgtgtttctgatgccgagcaaagagtggagctttatctctagtagcttggtgaaagaggtggcgcgccatcagggcgatgtcacccatttcctgccggagaatgtccatcaggcgctgatggcgaagttagcgtaacgtttatgccggatggtatgccatccggcgcgcatgaattacttctggcactgccgacaataaaacgttgcccgctgcgcatgtttagtcgccacaatcggcgtaccgcacacccgacacggctcaccttttcgcccgtaaacctgcaattcctgagcgaaatagcccggtttaccatcactttgcagaaaatctttcagcgttgtaccaccctgctcaatgctacgcagcaacaccgctttaatcacccgagctaacaattcacactctgccaggctcagactactcgccagccgatccggatggatccccgccgcaaacagactttcgctggcatagatattccctacccctaccaccagcttgttatccatcagccacggtttaatcgccgtttttttcttcgcgcacttctgatgcagatactcaccattgaaatcgtcgctaagcggctccggtccaagatgggtcagcacattatgcccttccagctctttggtccacagccaggcaccaaagcggcgcggatcggtgtagcgcagcactttgccgttgctcatcaccaaatccacatggtcatgcttttcagggggaagttcttctggaaggatgcgcaggctgccagacatccctaaatgaatgataatccagccctcaggcagctccagcagcagatatttagcccgccgctgcacgctaagcactggttggtcgcttaaacggtagatctcttcactaaccggccagcgcaagcgtccgttgcgcaccactgcatgaagaatggttgcaccaacgagatgcggttctatgccgcggcggctggtttcaacttcgggtaattcaggcatagcatctccaggaatgaacagatgcagtcaatatgggggcaagcagataacaaaaaaccccgccggagcgaggttttttgttacatcaaagcgagaattatttgattttcgcttctttgtagatcacgtgctggcgaacaactggatcgaattttttcagttccagtttttccggcttagtacgtttgttcttcgtagtggtatagaagtgaccagtaccagcagaagaaaccagcttgattttctcacgaatacctttagccatgatttatttcctctaagtacttagtacttttcgccacgggcacgcagttcagccagaactgtatcgatgccttttttatcgattacacgcatacctttagcagatacgcgcagggtgacaaaacgcttctcgctctcaacccagaaacggtgagagtgcaggttcggcaggaaacggcgtttagtcgcgttcagtgcgtgggaacggttgttaccggtcaccggacgcttgccagtaacttggcagactcgggacatgtctattctccaaaaatcaaattagctcgagcttcgtatggggtattggcgcctcgtcaggctttacagcccggtcatcgcagttctatgtgaactctcgattgccaggcccaaatgccaaacccgagattctcaaaggtggcgtagtatacgctgactcagcgatgtgctcaagtcccgaacagacaaagatcccgaaggatcgcgcatagcgggttaaatccagccgcgttcggcaaaagaaacatactctccacgcccaatcacgatatggtcgagcacgcgtaaatccatgaactgacaactctttattatccgttcagtaatgagtttatccgctttactgggttcagcacaaccgctagggtgattatgtgcaaggatcagcgcgctggcgtttatttttatcgcttcgcggataatttcccgaggatggacttcaacatggtttagcgtgccggaaaaaagacgcctatgcgttataacccggtgttgggagtcgagaaagatcaccataaagatctcccgctcctcacccgtgagctggctttgtaaaaattccctcgtcatctccgggctgagtaaagggctttcttcacgcatccgcacgttgtagtaacgccgcgccagttcagcaatcccctttaactgggcaaatttcgccacgccaattccatgaacgccactaaattgttcatattcagaggttaacaagccataaagagagccgaaattctccagcatctcttttgccagggttaatacatctttaccgcgcgttccggtacgcagaaatagcgccagcagctcgacatccgttaaggcgctaataccaaacttcagcattttttcgcgcggcatcaacagctgactattgtttttcaccttcacctcctttgtggtgctcgcatcctgtcatagccgtttcgttaaatcgacggccagttttcaatcctggaaagcgcctcgcaaagtgaatctcaggtgaaggcacgacaacaaaagtattgtgataaaatcgccaacttctggtgtcaccctacaggaaaaatcatcatgagcctggccggtaaaaaaatcgttctcggcgttagcggcggtattgctgcctataaaacccctgaactggtgcgtcgtttgcgcgatcgcggggccgacgtccgcgtagccatgaccgaagcggcaaaagcctttatcaccccacttagcttgcaggcggtttctggttatcccgtttccgacagtctgctggacccggcagccgaagccgctatgggccatattgagctgggtaaatgggctgatttagtgattctcgcccctgccacggcagatttgattgcccgtgttgctgccggaatggcgaatgacctggtaagcacgatttgtctggctacacctgcgcctgtagccgtgctccccgccatgaaccagcagatgtaccgtgccgctgccacgcagcataatttagaggtgcttgcttcccgtggtttgctcatctgggggccagacagtggcagtcaggcttgtggtgatatcggtcctgggcgaatgctcgatccgttaaccattgtggatatggcggtagcgcattttagccccgtcaacgacctgaaacatctgaacattatgattaccgccggcccgacgcgtgaaccgctcgatccggtgcgttatatctctaatcacagctccggcaagatgggttttgctatcgccgccgccgctgcccgtcgtggcgcgaacgtcacgctggtaagtggtccggttagtctaccgacgccaccgtttgttaaacgtgttgatgtgatgaccgcgctggaaatggaagccgccgtgaatgcttctgtacagcagcaaaatatttttatcggctgcgccgccgtggcggattatcgcgcagctaccgtggccccagagaaaatcaaaaagcaggccacgcagggtgatgaattaacaataaaaatggttaaaaaccccgatatcgtcgcaggcgttgccgcactaaaagaccatcgaccctacgtcgttggatttgccgccgaaacaaataatgtggaagaatacgcccggcaaaaacgtatccgtaaaaaccttgatctgatctgcgcgaacgatgtttcccagccaactcaaggatttaacagcgacaacaacgcattacaccttttctggcaggacggagataaagtcttaccgcttgagcgcaaagagctccttggccaattattactcgacgagatcgtgacccgttatgatgaaaaaaatcgacgttaagattctggacccgcgcgttgggaaggaatttccgctcccgacttatgccacctctggctctgccggacttgacctgcgtgcctgtctcaacgacgccgtagaactggctccgggtgacactacgctggttccgaccgggctggcgattcatattgccgatcctagtctggcggcaatgatgctgccgcgctccggattgggacataagcacggtatcgtgcttggtaacctggtaggattgatcgattctgactatcagggccagttgatgatttccgtgtggaaccgtggtcaggacagcttcaccattcaacctggcgaacgcatcgcccagatgatttttgttccggtagtacaggctgaatttaatctggtggaagatttcgacgccaccgaccgcggtgaaggcggctttggtcactctggtcgtcagtaacacatacgcatccgaataacgtcataacatagccgcaaacatttcgtttgcggtcatagcgtgggtgccgcctggcaagtgcttattttcaggggtattttgtaacatggcagaaaaacaaactgcgaaaaggaaccgtcgcgaggaaatacttcagtctctggcgctgatgctggaatccagcgatggaagccaacgtatcacgacggcaaaactggccgcctctgtcggcgtttccgaagcggcactgtatcgccacttccccagtaagacccgcatgttcgatagcctgattgagtttatcgaagatagcctgattactcgcatcaacctgattctgaaagatgagaaagacaccacagcgcgcctgcgtctgattgtgttgctgcttctcggttttggtgagcgtaatcctggcctgacccgcatcctcactggtcatgcgctaatgtttgaacaggatcgcctgcaagggcgcatcaaccagctgttcgagcgtattgaagcgcagctgcgccaggtattgcgtgaaaagagaatgcgtgagggtgaaggttacaccaccgatgaaaccctgctggcaagccagatcctggccttctgtgaaggtatgctgagtcgttttgtccgcagcgaatttaaataccgcccgacggatgattttgacgcccgctggccgctaattgcggcacagttgcagtaatatgacgccggatgacttttcatccggcgagtttctttaaacgccaaactcttcgcgataggccttaaccgccgccagatgttccgccatttccggcttctcttccaggtaagcaatcaggtctttcagggtgatgatagagatcactttgcagttgtaatcacgctcaacttcctgaatcgcgctaatctcgccgcgcccgcgttcctgacgatcgaggctaatcaacacgccagcaagcgtcgcgccattggcctgaataatctccatgctctcgcgaatcgccgttccggcggtgatcacatcatctaccagcattacgcgtccttgtaacgcgctaccaaccagattgccgccttcaccgtggtcttttgcttctttgcggttaaagcagtacggcaggtccaggtcgtgatgctccgccagtgccacagcggttgtggtggcaatcgggatccctttgtaagcagggccaaacagcagatcgaactcaatgccggaatccaccaacgcttcagcgtaaaaacggcctaacagtgccagatcgcgcccggtattaaacagcccggcgttgaagaaataggggcttttgcgcccggatttcagcgtaaactcgccaaactttaacacctgcttgctaagcgcaaattcaataaactggcgctgatatggtttcatgccttcgctcctcatcttacttttctacagacaaaaaaaaggcgactcatcagtcgccttaaaaatcagtttgccagcgccgccttctgcgtcgttacaatggattgctttcccctcgggccagagccaacaagatgagtagctcttcatgggtgaacggctcgccttctgccgtcccctgcacttcaatgatgcgcccgtcttcggtcatcactacgttcatgtcggtctctgcggcagagtcttcaacgtattccagatcgcaaaccgcttcgccgttcacaattccgacagaaactgcggctaccatccctttcatcggattggttttcagcttgccgttttccaccagcttctgtagcgcatctaccagcgccacgcaggcacccgtaatgctcgcggtacgcgtgccaccatcagcctgaagcacgtcgcagtccagcgtaatggtgaactcacccagcgctttcaaatctactgccgcgcgaagagcacgggcgatcagacgctggatttccattgtgcgtccaccctgcttacctttcgccgcttcacgagcgttacgggtgtgggtagaacgtggcagcatgccgtactctgcggtgatccagccctggccctgacctttcaggaagcgcggcacgccttcttcaatagaggcggtacacaacactttggtatcgccaaattcgaccagcacgctgccttctgcatgttttgtatagttacgagtcagggtaacgggacgcacctgattattgctacggcctgctggacgcatattgaaatctccggcttgaaacaaatgtggctgcgcattatacggacttccggcggttattcctatcctgacaaggcatcgatggctataatccttccacctctccttttataaacaggaacgtctatgatccgcagtatgaccgcctacgcccggcgtgaaatcaagggtgaatgggggagcgcaacctgggaaatgcgcagcgtaaaccagcgttatctggaaacttactttcgtctgccggagcagttccgtagccttgaacctgtcgttcgcgagcgtattcgttctcgcctgacgcgcggtaaagtggaatgtaccctgcgctatgagccagatgttagcgcgcaaggtgagctgatcctcaacgaaaaactggctaaacagctggtaactgccgcgaactgggtaaaaatgcagagtgacgaaggggaaatcaacccggttgatattctacgctggccgggcgtgatggcagcccaggagcaggatcttgacgccattgccgctgaaattctcgcggcgctggatggtacgctggacgactttattgtcgcgcgcgaaaccgaaggtcaggcactgaaagcattgatcgagcagcgtctggaaggcgtcaccgccgaagtggtcaaagtccgctcccatatgccggaaatcctgcaatggcagcgtgagcgtctggtcgcgaagctggaagatgctcaggtgcaactggaaaacaaccgtctggagcaggaactggttctgctggcacaacgaattgacgttgccgaagaactggatcgcctcgaagcgcatgtcaaagagacctacaacattctgaagaaaaaagaagcggttggtcgtcgtctggattttatgatgcaggagttcaaccgcgagagcaacactcttgcgagcaagtctatcaatgccgaagtgacaaactccgccatcgagctgaaagtgttgattgagcagatgcgcgagcagattcagaacatcgaataactcgtaacgccaattcttacttttccgccttcacaaatgccgccactcaaacagagcggcatttttcttccccgcaacattcaattctgttttgcgtgcctgctccagattttgcgatgtttttttgcccagcacactgagaacgtgagatactcacaactgtatataaatacagttacagatttactttctttgcaattgatatcacatggagtgggcaatgaacgaacatcatcaaccttttgaagagataaaactgattaatgcaaacggagcagaacaatggagtgcaagacaacttgggaaactactgggttatagtgagtatcgtcactttatacctgtattaacgcgcgccaaagaagcctgtgagaacagtggtcacacaattgatgaccatttcgaggagatcctcgatatggtcaaaattggcagtaatgccaaaagagcattaaaagacatcgtactctcccgctatgcctgttacctggtagtacaaaacggcgaccctgcgaaaccggtcattgcggcagggcagacttattttgctatccagacccgacggcaggagcttgctgacgatgaagcatttaagcaacttcgtgaagacgaaaagcgtctgtttctgagaaatgagttgaaagaacataacaaacaattggttgaggcagcacagcaagctggggtagcgacagctactgatttcgccatatttcagaatcatggttaccaggggctgtatggtggattagatcagaaagctattcatcagcggaaggggctgaaaaagaatcagaagatcctggatcatatgggtagtacagaactggcggctaatctctttcgagctacccaaacagaagaaaaactcaagcgggatggcgtgaatagtaaacagcaagcaaacaccacacactttgacgtgggtcgcaaggtgaggcaaaccattcaggaacttggcggaaccatgcctgaggagttgccgaccccgcaggtcagcatcaagcagttggaaaacagtgtaaaaattacagagaagaaataacagaaactaaaaactctttttgttgattgagacacccgatgcgtaagccaaggtccaggtgcagtgaacacaatggctaaatattgcacctttcttttccccctcagttttaacctattttttcttatgcattttctcagacaagaagtcagaagaatgcatctctgctacagaaaatagcgatttcacataactacaagttatcaatttcccctccccttaaaaaatctcaatcgtgacaatgcgcacaaatcgctaccctgccagacagatttttagggagagaaccatgctgttacacattttgtatttggttggcattactgccgaagccatgacgggggcgctggcggccggacgacggcgcatggatacatttggcgtaattattattgcgaccgccaccgcaattggcggagggagtgtgcgcgatattctgctgggccactatccgctcggctgggtcaaacacccggaatatgtgattatcgtcgctaccgccgcagtactcaccactatcgttgctcctgtaatgccttacctgcgcaaagtgtttctggtgctcgatgcgctcggactggtggtcttttctatcatcggggcacaggttgcactggatatggggcacggcccaattattgccgttgtcgcggcggtaaccaccggcgtgtttggcggcgttttgcgcgatatgttctgtaaacgtatcccactggtattccagaaagagttgtatgccggtgtcagttttgcctccgccgtgctgtacatcgcgctgcaacactatgtttctaaccatgatgtggtaattatctccaccctggtattcggcttttttgcccgcttactggcgctacgccttaagctgggattaccggtcttttactacagccacgaaggacattaaggttcaaaacctgtgatctgctgggcagccagccaactgcccagcttcttgatttgcgcattttccttccattcaataacctgtctggcgcgtccgcttccagtccccggcagctgctgccagaactgctccgtgctaaataaaagttggctccaggaccgttcatcactggcattaagcgccgcccgggttagcggtattcccattgccatcacccagcgagtaaaaggctgcttacgagccagattaaactgatgccatagctgcgcacttttacttttcgcgatccccggcgtgttctgtaattgctctggcgttaataaaagccaggaaaagatatgttcaaagcgatgagtctgatgcagcgcgcgccaaccggcctcaccaatgccatccagcccaagaacctgttttgcccccagccagactaagcgactaatgaactgttcctgacaaacatcagaagcaaagtagcaggtcaagctgttaaagcggttttctggcggtgtcggttttgtacgttctgcaccgcgccacaccacatcatcaatgcgaggaataccctgaccggcaaggctgacgagaatctgatcaccaggcgcaatatcccactcctgccagcgcctgacggaaccaatattcacccgctggacttttttatcatccagcatgacaggtgcgagactcgcaaccacgcttattttaccgctcttacccaccgcaaactgaattgccttcacttcggcaacctgagctacaggttgatatttccaggccaccagccactctgcctggcccggtagccaatggcgggattctggctctttcgccgctcgtacaactacgccatcggtgacgaagggtaattccgctttccaccactcattgcgtacgcgcgcaacttcatcagcatttttcaccgcacgggtatacgtctgcgttagagtaaaacctgcggtagccagctcttttaaacgatcagacattaactgcggtccatccggccatgcccagacaaaaacgcccagagaattcagcgtgtcgctatcgtcctggcgcatcatcaagccagcaacttttgcgcgggcatttattccccccatttgttgttggatatgcccctcgcgctggagaaatatttccccctgaagcgtactgttggctaaaggcccgctaacggtttgcggcacagcggaaattaagctaactttctgcgtccagtcctcgcctttcaggccattaccgcgactgattgctttgttcagtttcccgtcccgataaaccagggttaccgcaacgccatcaacttttggctgcacccaaagatcgctacgttctcgcatccacagacttaatgcgtttttatccaccattttgcgtacacccgtatgggcaaccggatgcataaccgcaccatttaaaggcggcatcatcacgtcgcggggctcgctcccaaagcagcgttgccactgcgtaagacgggcgcttaactgatcgtaaacaccgtcttccacctcactttttccttccttccagtagtcatcgtcccactgttttatttgctgttgcaggcgggaaatttcttcctgtgctctggctgggctccaggccggacagaccgcccacacagaactttgccagcacaagatacctattaatatcgccatccatactttcatcatcacctccgctgtagatagtcaggcagatatacaacgtgatgaaagcaaagccgagtggcaaaaacggagtctgcgaggacgcttcctgaaaatcgtctttattgcagtgaatgacaggcaaatgcggaagcagctacgcaaaacgcaacaactttgcgcaaaaagtgtgagcaagggctacgtcacatggccgcgccgtgtataataagctcgtatgtaggctttatttcgctaatcacatacgaaagatactcatggctcaaggcacgctttatattgtttccgcccccagtggcgcgggtaaatccagcctgattcaggctttattaaaaacccaaccgttgtgtgacacccaggtttctgttagtcacaccacacgccaaccgcgtcctggtgaagtccacggtgaacattatttctttgttaatcatgatgaatttaaagaaatgattagcagagatgcgttcctcgaacacgcagaagtttttggtaattactatggcactagccgtgaggccattgagcaagtactggcgaccggtgtcgatgtttttctcgatatcgactggcagggcgcgcagcaaattcgccagaagatgccgcacgcgcggagtatctttattttaccgccgtccaaaattgaactggaccgccgtctacgcggtcgcggtcaggacagcgaagaggtcattgcaaagcgtatggcgcaagctgttgcagaaatgagccattacgccgaatatgattatctgattgtgaatgatgacttcgataccgcgttgaccgatttgaagaccattattcgcgccgaacgtctgcgcatgagccgccaaaagcagcgtcatgacgctttaatcagcaaattgttggcagactgaacctgatttcagtatcatgcccagtcatttcttcacctgtggagctttttaagtatggcacgcgtaactgttcaggacgctgtagagaaaattggtaaccgttttgacctggtactggtcgccgcgcgtcgcgctcgtcagatgcaggtaggcggaaaggatccgctggtaccggaagaaaacgataaaaccactgtaatcgcgctgcgcgaaatcgaagaaggtctgatcaacaaccagatcctcgacgttcgcgaacgccaggaacagcaagagcaggaagccgctgaattacaagccgttaccgctattgctgaaggtcgtcgttaatcacaaagcgggtcgcccttgtatctgtttgaaagcctgaatcaactgattcaaacctacctgccggaagaccaaatcaagcgtctgcggcaggcgtatctcgttgcacgtgatgctcacgaggggcaaacacgtagtagcggtgaaccctatatcacgcacccggtagcggttgcctgcattctggccgagatgaaactcgactatgaaacgctgatggcggcgctgctgcatgacgtgattgaagatactcccgccacctaccaggatatggaacagctttttggtaaaagcgtcgccgagctggtagagggggtgagcaaacttgataaactcaagttccgcgataagaaagaggcgcaggccgaaaactttcgcaagatgattatggcgatggtgcaggatatccgcgtcatcctcatcaaacttgccgaccgtacccacaacatgcgcacgctgggcagtcttcgcccggacaaacgtcgccgcatcgcccgtgaaactctcgaaatttatagcccgctggcgcaccgtttaggtatccaccacattaaaaccgaactcgaagagctgggttttgaggcgctgtatcccaaccgttatcgcgtaatcaaagaagtggtgaaagccgcgcgcggcaaccgtaaagagatgatccagaagattctttctgaaatcgaagggcgtttgcaggaagcgggaataccgtgccgcgtcagtggtcgcgagaagcatctttatagcatttactgcaaaatggtgctcaaagagcagcgttttcacagcatcatggacatctacgctttccgcgtgatcgtcaatgattctgacacctgttatcgcgtgctgggccagatgcacagcctgtacaagccgcgtccgggccgcgtgaaagactatatcgccattccaaaagcgaacggctatcagtctttgcacaccagcatgatcggcccgcacggtgtgccggttgaggtccagatccgtaccgaagatatggaccagatggcggagatgggtgttgccgcgcactgggcttataaagagcacggcgaaaccagtactaccgcacaaatccgcgcccagcgctggatgcaaagcctgctggagctgcaacagagcgccggtagtagctttgaatttatcgagagcgttaaatccgatctcttcccggatgagatttacgttttcacaccggaagggcgcattgtcgagctgcctgccggtgcaacgcccgtcgacttcgcttatgcagtgcataccgatatcggtcatgcctgcgtgggcgcacgcgttgaccgccagccttacccgctgagccagccgcttaccagcggtcaaaccgttgaaatcattaccgctccgggcgctcgcccgaatgccgcttggctgaactttgtcgttagcagcaaagcgcgcgccaaaattcgtcagttgctgaaaaacctcaagcgtgatgattctgtaagcctgggccgtcgtctgctcaaccatgctttgggtggtagccgtaagctgaatgaaatcccgcaggaaaatattcagcgcgagctggatcgcatgaagctggcaacgcttgacgatctgctggcagaaatcggacttggtaacgcaatgagcgtggtggtcgcgaaaaatctgcaacatggggacgcctccattccaccggcaacccaaagccacggacatctgcccattaaaggtgccgatggcgtgctgatcacctttgcgaaatgctgccgccctattcctggcgacccgattatcgcccacgtcagccccggtaaaggtctggtgatccaccatgaatcctgccgtaatatccgtggctaccagaaagagccagagaagtttatggctgtggaatgggataaagagacggcgcaggagttcatcaccgaaatcaaggtggagatgttcaatcatcagggtgcgctggcaaacctgacggcggcaattaacaccacgactagcaatattcaaagtttgaatacggaagagaaagatggtcgcgtctacagcgcctttattcgtctgaccgctcgtgaccgtgtgcatctggcgaatatcatgcgcaaaatccgcgtgatgccagacgtgattaaagtcacccgaaaccgaaattaatgttttatgaacccaacacgttatgcacgcatctgcgaaatgctcgccaggcggcagcctgatctgaccgtctgcatggagcaggtccacaaacctcataacgtttctgcgattattcgtaccgcagatgccgttggcgtacatgaagttcacgccgtctggcctggtagccgcatgcgcaccatggctagcgcagcggcgggtagtaacagctgggtacaggtgaaaacacaccgcaccattggcgatgccgtcgctcatctcaaaggccagggcatgcagattctggcaacccatctttctgataacgctgtcgatttccgcgaaattgattacactcgcccgacctgcattttgatgggacaggagaaaacgggcatcacgcaggaagcattggccctggcggatcaggacatcatcattccgatgatcggcatggtgcagagcctgaatgtttccgttgccagtgccctcattctttacgaagcccagcgtcagcggcaaaatgcaggcatgtacctgcgtgaaaacagcatgttgccggaagcagagcaacaacgcctgttgtttgaaggcggctatccggtgctggcgaaagtcgcaaaacgcaaaggcctgccttatccccacgtcaatcagcaaggcgagatcgaagctgatgccgactggtgggctactatgcaggctgcagggtaagtgccatgaaaggtcgcctgttagatgctgtcccactcagttccctaacgggcgttggcgcagcacttagtaacaaactggcgaaaatcaacctgcataccgtgcaggatctactcttacaccttcccctgcgctacgaagatcgcacccatctctaccccatcggagaactactgccgggcgtttatgccacggtggaaggcgaagtgctgaactgcaatatctccttcggcggtcggcggatgatgacctgccagatcagcgacggttccggcatcctcaccatgcgctttttcaatttcagcgcggcaatgaaaaatagcctggcggcgggccgccgtgtactggcttatggcgaagcaaagcgcggtaaatatggtgcggagatgatccacccggaataccgcgtgcagggcgatctcagcacgccagaattacaggaaacgctcacgccggtttatccaacaacggaaggcgtaaagcaggccacgctgcgtaaattaaccgaccaggcgctggatctgctcgacacctgcgccattgaagaactcctgccgccggaactgagtcaaggaatgatgacgctaccggaagcgttgcgcactttgcaccgcccgccaccgacgctacagcttagcgatctggaaaccgggcagcatccggcgcaacgtcgtctgattctggaagaactgctggcgcacaacctcagcatgttagccttacgtgccggagcacagcgttttcatgcccagccgctgagcgccaatgacacgctgaaaaataaactcctcgccgccttaccgttcaagccaacgggcgcacaggcacgcgtagtggcggagatcgagcgcgatatggcgctggatgtgccgatgatgcgtctggtgcagggcgatgtaggttccggtaaaacgctggtcgccgccctcgccgcgttgcgtgcgattgcccacggcaaacaggtagcattgatggcaccaaccgaattactcgccgagcagcacgccaataacttccgcaactggtttgcaccgctcggtatcgaagtgggctggctcgccggtaagcagaaaggtaaagcacggctggcacagcaggaagccatcgccagcggtcaggtgcagatgattgtcggtacacacgccatcttccaggaacaggtgcagtttaacggcctggcgctggtgattatcgacgaacagcatcgttttggcgtgcatcagcgtctggcattgtgggagaaaggccagcagcagggcttccatccgcatcagttgatcatgaccgccacgccgatcccccgcacgctggcaatgactgcgtatgccgatctcgataccagcgtgatagatgagctgccgccaggccgcacgccagtgactacggtcgctattcctgatacccgccgtaccgacatcattgaccgcgtgcaccacgcctgcataactgaaggtcgtcaggcatactgggtttgtacgttgattgaagagagcgaattgctggaagcgcaggcggcggaagctacctgggaagagttgaaactggcgctaccagagttgaacgttggcctggtacacgggcggatgaaacctgccgagaaacaggcggtgatggcgagctttaaacaaggtgagctacacctgctggttgccacaaccgttattgaagtcggcgttgatgtgcctaacgccagtctgatgattatcgaaaacccggagcgtctgggtctggcgcagttacaccagctgcgcgggcgcgtaggtcgtggcgcggtggcttctcactgcgtgctgctctacaaaacgccgctttctaaaacggcgcaaattcgcctgcaagtgctgcgcgacagtaacgacggttttgtgattgcgcaaaaagatctggagattcgcggccctggcgaattgttaggcacgcgtcagacgggtaatgctgaatttaaagtggcggatttactgcgcgatcaggcgatgatcccggaagttcagcgcctggcacgccatattcacgaacgttacccacaacaggcaaaagccctgatagaacgctggatgccggagacggaacgttacagcaatgcgtaaaaggcggcagtgagaagaccgccatttcaggttaccctaccttcctgccggatgcgattcatcaccctacaaattcaataaattatgaatcaatacgcaggcttgataagcgaagcgtatcaggcatttgtctttgttgcggcggcacttctaccgccgcttcatcggttaaccggcaaaaatcggcaacatcaaatacaacttaattaccagcgcattgacgatatcgataaagaacgcaccgaccatcggcaccaccaaaaacgccatgtggctcgggccaaagcgttcagtgatcgcctgcatgttggcgattgccgttggcgttgcaccgaggccaaaaccacagtgacccgcagccagcactgccgcatcgtagtttttgcccatcatgcgccaggtaacgaagatggcatacaacgccatgaagatggtctgtaccaccagaatcgccagcatcggcagcgccaggctagccagctcccacagtttcagccccatcaacgccatcgccaggaacaagctcaagcttacgttacccagcacggataccgcacgctcaaagacgcggtaaaagcccattatactcagaccgttgctcagaatcacgccaacaaacagtacacagacgaaggtcggcagttcaaaagcagtgccagccaaaagttgcgcaacaattttccccaccgtcaggcagatagcaatcagcgcgatagtttcaatcagcaccaagctggtgatcatgcgtcccacatccggcttttcaaacgccgtcgggacttcctggtcatccggaataccgttcggcgtggtggagtgtttcaccagatagcgcgccaccggaccgccaatcaagccgcccagcaccagaccgaacgttgcacaggccatcgccacttccgtcgcattggtgaagccataacgttcaatgaacaatttactccacgcagcgcccgtaccgtgaccgccggaaagagtaatagaaccggccaacagccccatcagcggatcaagccctaacaagctagccataccaatgccaatggcattttgcatcaccaacagaccaacaaccacaatcaagaagatgccaaccacacgcccaccggcacgcaaactggcaatgttggcgttcaggccaatggtggcgaagaaagccagcattaacggatcgcgcagggacatatcaaagttgacttcccagcccatgctttttttcagtactagtagcgccagcgccaccaacaaaccacccgcaacaggttccggtatggtgtatttcttcaaaaaggagacggaatggaccaacttacgcccgagcagcaacgtcagcgttgcggcaacaagcgttgctaaagtatcgagatgaaacatagttactcctttgtatccgcatcactctttcatactcgtcatacttcatcgcgcagtggcaacttcatgaactatgacgggtatcgagttatgctttcctgggtcaaattctcagctgttaatgaacaaatggcatggattttaagcagaaaaataccaaaagttatataaaaaagtgcatttatctcatttaaatatttagatgaggatgtggcaaacgtttgcttttctctttcggtcagctaaaatgcccgctttgctaccacgggattgttttcgatgtctgtttccaccctcgagagtgaaaatgcgcaaccggttgcgcagactcaaaacagcgaactgatttaccgtcttgaagatcgtccgccgcttcctcaaaccctgtttgccgcctgtcagcatctgctggcgatgttcgttgcggtgatcacgccagcgctattaatctgccaggcgctgggtttaccggcacaagacacgcaacacattattagtatgagcctgtttgcctccggtgtggcaagcattattcaaattaaggcctggggtccggttggctccgggctgttgtctattcagggcaccagcttcaactttgttgccccgctgattatgggcggtaccgcgctgaaaaccggtggtgctgatgttcctaccatgatggcggctttgttcggcacgttgatgctggcaagttgcaccgagatggtgatctcccgcgttctgcatctggcgcgccgcattattacgccgctggtttctggcgttgtggtgatgattatcggcctgagcctaattcaggttgggttaacgtccattggcggcggttacgcagccatgagcgataacaccttcggcgcaccgaaaaatctgctgctggcaggcgtggtcttagccttaattatcctgcttaaccgtcaacgtaacccttacttacgcgtggccagtctggtaattgcgatggcggccggatatgcgctggcgtggtttatgggcatgttgccagaaagcaacgaacctatgacgcaagaactgattatggtgccaacgccgctctattacggtcttggcattgaatggagtctgctgctgccgctgatgctggtctttatgatcactagcctggaaaccattggcgatatcacggcgacctctgacgtttccgaacagccagtgtccggtccgctgtacatgaaacgcctgaaaggcggcgtgctggcaaacggcctgaacagctttgttagcgcggtgtttaacaccttcccgaactcctgcttcgggcaaaacaacggagtgatccagttgactggtgttgccagccgctatgtcggttttgtcgtcgcgctgatgttgatcgtgctgggtctgttcccggcagtgagcggttttgtacaacacattccagaaccggttctgggcggcgcaacgcttgtaatgtttggcaccatcgccgcctccggtgtgcgtatcgtttctcgtgagccgctgaaccgtcgggcgattctgattatcgcgctgagcctggcggttggtctgggcgtgtctcagcagccgctgattttgcagtttgcccctgaatggctgaaaaacctgctctcctccgggatcgccgcgggcggtattactgccatcgtgctgaatctgattttcccaccagaaaaacagtaattcactggcggcggtaagataattaccgccgcagtctcacctctttaaccattcccgccttgaggattgcgcgtaaatcgtgcataactcccttatgtgcatttcacgggatggaagaccatgaaatttattgggaagctgcttctctacattctcatcgctctgttagtggcgatcgctggcctctattttcttctgcaaacccgctggggagcagaacatatcagcgcatgggtttccgagaatagcgactatcatctggccttcggggcgatggatcaccgtttttccgcgccatctcatatcgtgctggagaacgtcacgtttggtcgtgatggccagcccgcgaccctggtggccaaaagtgtcgacattgcgctaagcagtcggcaactgaccgaaccacgccatgtcgataccatcctgctggaaaacgggacgctgaatctcaccgaccagaccgcgccgctaccgttcaaagccgatcgtctgcaactgcgtgatatggcgtttaatagcccgaatagcgaatggaaactgagcgcgcagcgggtaaatggcggcgtagttccgtggagtccaaaagccggtaaagtgctgggtacgaaggcgcagattcagtttagtgccggaagccttagcctcaatgatgttcctgccaccaatgtactgattgaaggcagtattgataacgatcgcgttacgctgactaacctgggtgccgacatcgcccgcgggacattaaccggaaacgcgcagcgtaacgccgacggcagctggcaagtggaaaacctgcgcatggcggatatacgtctacaaagcgaaaaaagcctaaccgacttctttgcgccattacgctctgtcccgagcttgcagattggtcgcctggaagtgatcgatgctcgtttgcaaggtccggactgggcggtgaccgacctcgatctcagcttgcgcaacatgaccttcagtaaagatgactggcagacacaggaaggcaaactgagcatgaacgctagcgagttcatttatggtagcctgcatttatttgacccgattataaacacggaattttccccgcagggcgtagcgctgcgccagttcaccagccgctgggaagggggtatggtcagaacgagtgggaactggctgcgtgacgggaaaacgttgatccttgatgatgcggcaattgccgggctggaatataccttgccgaaaaactggcaacagttgtggatggaaacgacacccggttggttaaacagcctgcaactgaagagatttagcgccagccgcaatctgatcattgatatcgaccctgacttcccgtggcagctcaccgcgctcgatggttacggtgccaacctgacgctggttaccgatcataaatggggcgtctggagtggcagcgcgaatctgaatgccgccgccgcgacattcaatcgtgttgatgttcgtcgcccgagcctggcgctgaccgccaacagcagcacggtgaatatcagcgaactgagtgcatttactgaaaaaggcattctggaagccaccgccagtgttagtcaaacgccacaacgtcagacacatatcagcctgaatggacgcggtgtgccggtgaatattttgcaacagtggggatggcctgaattaccgttgactggcgacggcaatattcagcttaccgccagtggcgatattcaggccaatgtcccgttgaaacctacggttagcgggcaattgcatgccgtgaacgccgcaaagcagcaagtgactcaaaccatgaatgctggcatcgtttccagcggtgaagttacaagcacggagccggtgcggtaaacatcaatctcgccgggtacgactcagacgtacccggcattccatcaatagattacaacgtaattgtcagcgcattcccttgaggcttcaccaccagcccctgctcactttcagcctggctaccgtcttgcagaccatttactttcacaacattgcgcaggcacagtgtccagttcttcgcctcgcccgcaccagtcacagtaatcgtgttgccagtacgtgctgcttttaaagtaaagatcacgcttccgtcagcagcgggcacttcacagacggcttcatgcccgtcttgcagattgaagaggtggaatgccgtgccttcgtgccacacgtaatcgggacgttgatcgttgttgcccagcgccagtagagtgttatcacgcacataaacgggcagactcaggaagccgtgctgctgtttatgccagcgactaccgtcgagttcatcgttgtgccacaggtgtgtccagcgaccttccggcaggtagaactgcacatcgcccgcttcagtgaacaccggcgcaaccatcacgttgtcgcctaacatgtattgacggtcaaggtaatcacaagccggatcgtccgggaactccatcatcatggcccgcatcatcggcgtaccccgcgcgttcgcacgcgcagcttcacgatacagatacggcatcatgcggcatttcagttgcgtgaagaagcgcaccacatcacaggactcatcatcgtaggcccacggcacacgataagatttgctaccgtgtaaacggctatggctggagagcaaaccaaacgcgcaccagcgtttgtaaacgtgcgccggagcggtattttcaaagccgccgatatcgtggctccagaagccaaaaccactaaggccaatagacaaaccaccgcgcaggctttccgccatactttcgtagttagcgtaacaatcgccaccccagtgtaccgggaatttctgcgcaccgacggaggcgctgcgggcaaacaagacagcttcttcctcaccaacggtgtccttgagcacgttccacaccagttcgttgtagatgtacgcataatggttatgcattttctgcggatcggaaccgtcaaaccactgaacatcagttgggatacgttcgccaaagtcggtcttaaagcaatcaacgcccatcgcgaccagacctttcagtttgtcggcgtaccatttgcaggcatccggattggtaaagtcataaatcgccagacctggctgccatttatcccactgccataggctaccgtccgggcgtttgagtaaatagcctttctcttgtaactctttaaagacgggggatttttgaccgatataggggttaatccagacgcagattttcagtcctttcgctttcaggcggcggatcatcccttccgggtcagggaaagtcagcgggtcccactcaaaatcgcaccactggaaggctttcatccagaaacagtcaaagtggaaaacatgcagcggcagattgcgttccgccataccatcgataaagctgtttaccgtcgcttcgtcgtagttggtggtaaaactagtggttagccacaggccgaaggaccacgcgggcggcagcgccggacgaccagtaaagcgggtataacgatcaagtaccgctttcggcgtcgggccgtcgataacaaagtattcgagatattcactctcaacgctgaactgcactttggagactttctcgcttcccacttcaaaagagacacactggggatgattgaccagtaccccataaccacggttagtcatgtagaacgggatatttttatacgcctgttcagtacttgtgccgccgtcccggttccaggtctctaccgtctggccattgcgcaccagggcagtaaagcgctctcccagaccgtaaactgtttcgccaacgccaagatcaagccgctcaaacatataattgcgttgattattcgtgtcctgcacgtagccattatttttcacctgactaccggtaatacgttcgccgttgcgcagaaaatccagactccagaactcacctttgctgacacgcgcgcttaagttgccacttttaaactcagcataacgttctgtgttttcgattgtgaccttcacgtcctgcaaaatattgagcggataatgaggaccgttattcagcgccccctgaaaatgctcaatccgcacaccgacaataccttcctgtggggagaaaaagcgcaacgtaaataaaggcgtatcaagctgccaggtacgttcacgcacatcacggggggcagcatagaccaccatttcattatcctgctgttcaacctcgaacacctgaagcgggtgaatcaaattgaggccaggttgaatcaaccagtttccatcgctaattttcattgccgttccttagttctgcacttcttgagaggtgaattgttgctggcaacggcgtttaccctgagccagctgttccataacggttttcagattgtgcgtcgtgagactgtagtagcgtttagcgataatcgcgctcagcaaataacagatcgccggaacaatcgtgaatagcgcaataatgatgctaatcgtggcgctgttctgcgctttttctgccgcatcatatccgccataagccagcatccagccgataagagcgccgccgaaggccaaccccagtttgagcacaaacagcgtgccagcaaaactgatcccggtcaggcgtttaccattgcaccactcgccgtagtcgacggtatcggacatcattacccactggataggtgtcaccagttgatgcaacacaccaatcacgaagatgaagacaaacatagtgatgctggcctgcatgggaacaaagaacatcgcgaggctaatcactgccagcagggcgttcgtccaccagaagatagtgactttacatttccagtcggtcagaggttttgccagtgcggaaccaatcaggttacccacgcaataagtggtgagaaaagcgacaaacacttccggcgtgcccaaaatccatgtgacgtaatacatcatcgccccaccgcgtacgcacaccgccaggatattgaaaatggttagtaaaccgacaatccgccactggtcgttttgccagatatcacgtaaatcttcccgcatagacgttgttgtaggtggtgcttcaacgcgttctttagtggtgaagaaacaaaatgccagcatcatgaatgccaccacggaaaggaccgcgataccgccctggaaaccgagtggtttattatcaccgccaattaaattaaccagtggcatcatcagaacagtagaaagcatgcctcccgcggtcgccagcacaaaacgccaggattgcaggctgatacgctgagtcgggtcattggtgattacaccacccaatgcgcagtaagggatattgacgacggtataaagtaaggtaagtagggtgtaagtaattgctgcatagatcattttgccgttcatactgagatctggcgtgctataggccagtacacagacgatcccgaatggcagtgcgccaaacagtacccacggacgaaatttaccccagcgagagcgcgttcgatcggccaacaaccccatgcaaggatcggaaatcgcatccagtgcacgagcgaccaaaaacatggttccgacaaaaccggcaggaatgccaaaaatatcggtataaaagaacatcatatataacattacgttatcgaaaataatgtggctggcggcgtctcccatgccataaccaattttctctttaacggacaacacttcactcttcatctgcttttccttgatgctataggggtgctgagaccgataacgcattttgtaaaccatccctgtgagagcgaatattccgatatctggttattaatttatgattcttgttttatgtgatcgtggtagcgttaattccgctcatatatcattgtaaaatatgggttttatatgaactataatgctttcgtgataatacgctgcgtgtattaggcggaaaaaactgatctgggggatgtagaaactcaaggaagtagctataatgcgccccgcctccatgtagcaatcgaggcgcggaagatcgtcgtctccggtgaggcggctggacttcaaatccagttggggccgccagcggtcccgggcaggttcgactcctgtgatcttccgccaaaatgcctctcctgacgttctccaaccccttgtaatactgtcaatccagatattttctactgctcaatattcaatcggcttcaggaatacctggtctaaggttttgtgatggacgatgagcggctgaagaatccgcctgtcggttcttctgtcctcgaacgcatccgcgatattcacgccagtatgcgccgtgtttatttgcaggtgatttgcccccctgctgactctcagccaactgtatcgccattaaggtgaagatgttgttttactcgccccagaacacccttttttatacgactattctatttctttaaccgctggcgaaaaaaactgactataaacttcaccaataatcagactgccatcaagattaatttgttcatttaatatatcaaatcaacttgttttatttttactatcaaaaatagctcattgccttactataattaatatataaattcggtaattaattcttaacatgcttttactaataatctcaattgctggccctataatattgcgctagcattgctttctggttgtatcagcgatactcaaaaattcttaatacaatactcattcgactggtacttatttgtaactcagttatattttttcgcccggtgattcagaagaatgcaaaaaacggctaccactccaagtaaaatacttgatctcactgccgcggcatttttacttgtcgcctttctgacgggtattgcgggcgctcttcagactcctaccctaagtatattcctcgcagatgaactgaaagcccgtcctataatggtaggttttttcttcaccggtagcgctattatgggaattctggtcagtcaatttctggcaaggcactccgataaacaaggcgaccgtaaattactgattctgctatgttgcttatttggagtgctggcctgcacgctttttgcgtggaatcgcaactacttcattctcctcagtacgggcgtacttctgagtagttttgcttccaccgcaaacccgcaaatgttcgccctcgcccgtgaacacgccgacagaacaggccgtgagacggtcatgttcagtacatttttacgtgctcagatcagccttgcctgggttatcgggccaccgctcgcttatgaactggcaatgggatttagttttaaagtgatgtatctcaccgctgccatcgcatttgttgtttgcggactgatagtctggttgtttttgccaagtatacaaagaaatattcctgtcgttacccaacccgtagaaattttaccctccacccacaggaagcgggatacgcggctactttttgtggtctgtagtatgatgtgggcggcgaataatctctacatgataaatatgccgctatttattattgatgaactgcatctaaccgataaactgactggagaaatgattggtatcgctgccggtctggaaattccgatgatgttaatcgcaggctattacatgaaacgtattggcaagcgactattaatgctcattgctatcgtgagtggaatgtgtttttacgccagcgtactcatggcgacgactccggcggttgagctggaattgcaaattcttaatgccatcttccttggtattctctgtggtatcggcatgctttattttcaggacttgatgcctgaaaaaataggctctgcgacaacgttatatgcaaatactagtcgcgtcggctggattatcgccggctctgttgacggaattatggttgaaatctggagctaccatgcgttgttctggctggcgatagggatgttgggtattgcgatgatttgcctgctgtttattaaagatatttaactcaccagtctgggctaagaaaaatcggcgtggcgcaaacagagccatcctcgccatttttgctatcatgcctgcatacataaacgacaaaacagtatgcagagggaaaaatgggttccaccagaaaggggatgctgaacgttctgattgccgccgtgttgtggggaagtagtggggtctgcgcgcaatacatcatggagcaaagccagatgagcagccagtttttgactatgacgcgtttgatattcgccggtttgattctactgacgctgagttttgttcatggcgataaaatcttttctattattaacaatcataaagatgccattagcctgctgattttttccgtggttggcgcgctaactgtacagctcacttttttgctaaccatcgaaaaaagcaacgcagccacggcaacggtgctgcaattcctcagtccgacgattatcgtcgcctggttcagtctggtgcgtaaaagccgcccgggcattctggttttctgcgctattttgacaagcctggtcgggacttttttattggtgacacacggtaatccgacgagtttaagcatctctcctgccgcgttgttctggggcattgccagcgcatttgctgctgcattctataccacctatcccagtacgctaattgcccgctatggcacgttaccagtcgtcggctggagtatgctgattggcggtctgattctgttgcctttttatgccagacaaggaacaaactttgtcgttaacggcagtttgattctggcgtttttttatttggtggtcattggtacgtccctgacatttagtctgtacctgaaaggagcacaattaattggcggtccaaaagccagcattttgagctgtgcagaaccattaagtagcgcgctactctctttgctgttgctggggatcacgttcacattaccggactggctgggaacgctgctgattctgagtagcgtgattttgattagtatggattcccgtcgccgcgccagaaaaataaatcgtccggcgcggcataagtgagaattaccagccaggcaccgcgccaccgttaaaaatggtttctgccgctttagcgacttcgggactttgataagattgcagaaattccttcacgttttctgcattcttattatcttcccgtgccaccaaaatattcacatacgggctattcttatcttcaataaatacgctgtcgtgcaccggagaaagcccggtctgctgaatgtaagtggtgctgataatcgctacatcaactttgggatcatccagtacgcgcgggagctgcgccccctcgagttccataatctgcaaatgacgaggattatcggttatatccagcgcggtaggtaataacccttttccctctttcagagtaattagcttctctttttgcaacagtaaaagtgcgcgaccaaggttggtcgggtcgttggggatcgccactgtcgcgccttcttttatttgcgccacggttttgatttttttggaataacccgccatagggaagacaaacgtatttcccaccgctaccagtttataaccatgcgcctgattatcttgttcaagaaagggtcgatgctggaagacattcgcatcaagttcgccatgatttgtcgcatcgttcggtagcaagctaccgctaaatcctaccagttcaacatcgaggccatatttctcttttgccacctttttagcgacttccgcgacatcttgttctgcgccatttataacgccaactttaatgtgttttgcatcgctgctactctggtcgcaacctgccagcagaattccggccagcaataatgcggcccctgtccgtagatgatgtgttgtcagtttcatttttttatccttttattaatgattacctgactatagcggtaaggtcgctgcggtttaaaaaacgaaacgctatcgataagaataaaaaggaataaaagtggaatataaagtctggcacttcttactgaccacgcaagcgcgtttcgtacagcatgatgagagcgatgaaagcaaactacacttatgcttcattcgatacacatttgtaaaaggttgaatccatgaaaccaacgacactactgcttattttcacttttttcgctatgccaggcatcgtatacgccgagagcccttttagcagtctgcagtccgcaaaagagaaaaccacggtattacaagatttacgtaaaatttgcacgccacaggcgagtttaagtgatgaagcgtgggaaaagttaatgttgagtgatgaaaacaataaacaacatatacgcgaggccatcgtggcgatggaacgtaataatcagagcaattattgggaagcgttgggtaaggtagaatgcccggatatgtaagaacagcaacaactactgaccaacgcttctttacctgatatcaggatttcttcattttcacctttgcagtaaccaacaatgcagtcagcaacatcaatgtgccggacaacatcaacgggctagtcagaccaatattatccagcgcataaccgccgattgccgcgccacaggtattagcaagctgaataaccgccacctgaatagacccggctttttctgcctgatcggccaggctgcgggtgatccacgtactccagccgacgggaaccaatgcaaaagttagcccccagataatcgccacgccggtagcaacgattttatcgcttccccacaacgtcagtaccaacgcactcacagccagtattaacggcgcgcctgctaaggccagttttacgctacgtttaagaatgaagctgctaaggctcgtaccaataaagctggcgataccaaaactcaacagcaccagcgttaagccatccacgccgaatcccgccaggttcatatacaccgggcgaatatacgtgaagaaagcaaactgcccggcgaaagacatgaagatggcgatcatccctgccatcacacccggacgttgtaataagcggaaagtattttgtttctgatggctgggttcgcctggcagactaggcaaacttttgataatccagaaaatacacagcacgcccatcaccgccgccgcattaaagacattgcgccaaccgataagctcgcctaaaaaactgcccaacggcgcggcaatcaccagcgcaatagaaaccgcgccgaagatcacgctcagcgccttcggcaccgtacgcggcggcaccagacgcatggtcaggctcgcgctcatcgcccagaacccgcccagcgccagccccagacaggcacgaccgattaaaagcaaactgaaactgttagcaaaggaaaccagcaagcaggagagcgtcagcaaaacggcaaacaaaataacaacgtagcggcggtcagtagcctgaattgtctgggtaataaacaaactggcaaacattgccacaaaggcggtcacggtcacgctttgcccggcaaccccttcgctaatgcctaaatcctgggccattggcgtcaacaaactgacgggcaaaaactcaacgataatcagacaggcgacacaaaacgccacgctgaaaacggcactccagttcggtcgggtgatggcatccgcgccgcggttttcggcaataaattcactcatggtgttacccgtggcatgtttcaggggaaaagcgctccactttaacatactaatgtgactcgcatttaacgtttttgcaacttttacggtgttgctactgctggagttaagatcgaaacggaacagggcaaagattaccggatgcggcgtgaacgtcttatccacccgacaggtcaggcgcggtctgtaggctgataagacgaaacggtttcaatgcaaccagtgaacgccctcggcaggctgaaagaacgcgttatagcgcatctgaaaagcattaatatcctgcatttcaggttcggtttcgcgcagaaaacctagcgccagcctgacctgagcgtcggtaatcggcgcggcgaggcgagctttttgtaaaatccgatgccattgcagcaggttctgttcgctaccatcgacaatgacaatttgccagatgagcaacacctgcgcggcgttttgcaggtggctctcatccggacgatgcaaataacgtaaaaattcgtcaccagcactctttcccatttgatcgaccatgctctccacgggtacgacatcgatgttcagccgatcgctgagacggcgaatcgcttttctggccccggatgtcagcacccgaaaaccaaccacaaacactaccgccagcgtggcgagcattatccagatcatgagttctcctgcgtaatcagaactcatgatatctggaaaccctcgccagttattaatccaccagaataatcttcagtgcaaacagagctgcgaccaccaccacacacaggttcagatcgcgccagcgcccggtgcatactttcatgatgcagtagctcataaagccgagtgcaatcccttcggtgatgctgaaagtaaagggcatcatcaccgtggtaataaacgcaggcacgctttcggtaaaatcatcccagttaacgcgcgccaggctgctagtcatcagcacgccaacaaagattaacgctccggcggttgcgtaaggaggaactatcgccaccagcggactgaagaacataaccaacaggaacataacgccaaccacaaccgcagtcagccccgtgcggccaccgactgccacaccagaagtactttcaatataggcagtaacagagctggtgccgataaacgcacccgccacgctactgacgctatcaacatacagcgccttattcatattggggaatttaccgttaccatctattaagcccgctttatcagttacaccaattaatgttccactactatcaaataggttgatcagcataaaggagaaaatgataccggcgagttcaagtgttaacgcgccgctcaaatctacttcaccaatgacgccgctaatatcaggcggaatggaatagacgccgctaaaatgaacatcaccgaaaaataatccacagcaagacgtcaccacaatagaaaccagcaccgcggcatgaaaatgacgactactcaacacggttataataaaaaaccctaaaatacctaacaacacgccgtgagaacttaaatcgccaatcatcaccagcgtgtctttattggcgacaataacgccagtattttttaatcccattaaggcgataaataatccaattccgctggtgataccaatacgtaaacttaagggaatgttggagatcatccagtaccggatacgaaacagcgtgagcaaaaatagtccaactgcgccccagaatattgcgcccatcccggtctgccaggagatgcccatcgcccccacgaccacgaaggcaaagaaggcgttcagccccattgccggagccagcgccacgggtaagttagcaaatatccccatcgcaatactgccgataccggcaatcaaacaggtggtaacaaacaccactttcgggtccatttgtgccgcgccgaggatttgcgggttcacaaaaacgatgtacaccatggttaaaaaagtggtcatccccgcaatcaattctgtgcggacggtggtcccatgctgaggtagtttaaataatcggctaagcgtcccactttcattactcacgtaatcggtattgtcattattcatttttttgtccattggaggagatttaatcccttgcttttgtaaaacaaatgacaacaacggttcagtgataattatcacatttcaattgcacattaatggatattctttaataatctcgcgacgtttctttatgataaataataatcaaattgataaaatcaaaatgagaaaaatatgaataattctattaaccataaatttcatcacattagccgggctgaataccaggaattgttagccgtttcccgtggcgacgctgttgccgattatattattgataatgtctctattctcgacctgatcaatggcggagaaatttccggcccaattgtgattaaaggacgttacattgccggtgttggcgcagaatacactgatgctccggctttgcagcggattgatgctcgcggcgcaacggcggtgccagggtttattgatgctcacctgcatattgaatccagcatgatgacgccggtcacttttgaaaccgctaccctgccgcgcggcctgacgaccgttatttgcgaccctcatgaaatcgtcaacgtgatgggcgaagccggattcgcctggtttgcccgctgtgccgaacaggcaaggcaaaaccagtacttacaggtcagctcttgcgtacccgccctggaaggctgcgatgttaacggtgccagttttacccttgaacagatgctcgcctggcgggaccatccgcaggttaccggccttgcagaaatgatggactaccctggcgtaattagcgggcagaatgcgctgctcgataaactggatgcatttcgccacctgacgctggacggtcactgcccgggtttgggtggtaaagaacttaacgcctatattactgcgggtattgaaaactgccacgaaagttatcagctggaagaaggacgccggaaattacaactcggcatgagcttgatgatccgcgaagggtccgctgcccgcaatctcaacgcgctggcaccgttgatcaacgaatttaacagcccgcaatgcatgctctgtaccgatgaccgtaacccgtgggagatcgcccatgaaggacacatcgatgccttaattcgccgcctgatcgaacaacacaatgtgccgctgcatgtggcatatcgcgtcgccagctggagcacggcgcgccactttggtctgaatcacctcggcttactggcacccggcaagcaggccgatatcgtcctgttgagcgatgcgcgtaaggtcacggtgcagcaggtactggtgaaaggcgagccgattgatgcgcaaaccttacaggcggaagagagcgcgagactggcacaatccgctccgccatatggcaacaccattgcccgccagccagtttccgccagcgactttgccctgcaatttacgcccggaaaacgctatcgggtcattgacgtcatccataacgaattgattacgcactcccactccagcgtctacagcgaaaatggttttgatcgcgatgatgtgagctttattgccgtacttgagcgttacgggcaacggctggctccggcttgtggtttgcttggcggctttggactgaatgaaggtgcgctggctgcgacggtcagccatgacagccataatattgtggtgatcggtcgcagtgccgaagagatggcgctggcggtcaatcaggtgattcaggatggcggcgggctgtgcgtggtacgtaacggccaggtacaaagtcatctgccgttacccattgccgggctgatgagcaccgacacggcgcagagcctggcggaacaaattgacgccttgaaagccgccgcccgtgaatgcggtccgttacccgatgagccgtttattcagatggcgtttctttctctgccagtgatccccgcgctaaaactaaccagtcaggggctatttgatggcgagaagtttgccttcactacgctggaagtcacggaataataaaaaaagcccggcgtcatgccgggcaaaagtcaccagttacgtttatgccactgtcaactgctgaatttttttctcgcggcggattttgcgttcttccattaccgccactatcgccatcaggcagatacaaccaatcgcggcgatatccagcgcggcgaaggtgcctgcccagccggtaaggccgaataccggcgtcccatcggcaatcattcccagacctaacttggcaaagctgtcaccaatcaggtaagcaaaggtgcctttaataccatcggcagcgccaatcgcttttttaggtacaaagccaacagcagccacaccaatcaacaattgcgggccaaagaccaggaaacccaacgcaaagagagaagccagatagatatattcgttactggcatgttgatacacaccgagcgtggcgataatcagcgccagcgcgatgcaggccaccaggccacggcgaccgttcgccaggtcagagagccagccccacagcagcgtaccgaccagcgcaccagcttcaaacagcgtaaagccctgaatcgccaccgctttagagagtttcagttcctggaacgcgtatacggtactccactggtcgataccaatacgtaccacatagaggaaaatgttggcgaagcacagcagccagatcactttgtttttcagcacatactcaacaaagatctgccacttggtcatatcggtagattctgtctctttgtcctcttcgctgatctcctcgccgaacagttcttcagctttgccgaggccataagattccggggagtcgctgccgtaacgcaggccgataaaaccgacaatcagcgcgataatgctcgggaagataaacatgccgatgacatggccatcgaacaggtaatttgccccgaacagcgccacacctgctgcgcctgcaccgccaaggttgtgagaaatattccagaaaccgaggaatgtcccgcgtttacgacgcggcgtccatttggtgatggtggagtaactgcagctaccgccggtactctggaaaaagccgcttaaggcgtagaaggcaatcatcaggaacaggctaacgctgccgctgcccatactggcactgaagcccagcatacaaatagcagagaggatcagcatgaacggcaggaattgtttggtgtttttgccgtcggcgtagtaggaaaccagcgttttacccacgccataagtgatggagaaacccaggccgatcatccccagctgcgtcatgctcaacccgtaggtgctaatcatatcgttctgcgcgatgttaaagttcttgcgaatcaggtacatcgtcaggtagccgataaagaccaccaggtaggattgcatgaacggtttgaaccacattttgcgccgcacttcgagcggaaggtccagggtcggcttgcgaacctggtttaagaaagccagcatgggttactcctgaaatgaatacctgcgtgaggcatgcattgtaaaaatcagcagcaaatcaggcctgagatagcgtccaggcaaaacctggaaaatttcttagttttgccggatatgaagtgaaaaggtgagatgcatcacgcttcgcgcggtgtctgggcgttcaaaaagggcagtaacagcagtgcggaaatcccggcggcgatagagataaccacaaaaaatccgctccagtgccaggtatcgagtactttcgccagcggccaaccagcaaggctcgcccccagataagcaaacaagccgacaaaccccgtcgccgcccctgccgcctctttgtgggaacactctgccgccgccataccgattaacatctgtgggccaaagacaaaaaaaccaatggtgaagaagcaggttgcctgcatcacgtagctggcaaatggcatcagccacagggagccgacactaagcaaaattccggcggcgaaaatcaaattcatcggccctcggttgccgttaaacaatttgtcgctgccccaaccggctaccagcgcaccgataaatccgcccagttcaaacatcgtcactgccgtattcgccgtgaccagatcgacgcccagtgtctcggacatatacaaattgccccagtcgttgatcgccgcccggaccacatagaccagcacatagcaaaagctaagcagccagatatacggattcagcaacacatatttggtgaggatctctttacgcgtcaaccctgccccttcttgttgttgagcaatttccagcgcgtcgtgtcgccattcaccgaccgccggtaaacctaacgcctgcgggcgatcgcgtagccgccagcagagaaaaatccccacgactatcgccatacaaccagcaatcatcatcccggcacgccagccgtaatgcagcgcagccgctgccatcacaatgggaatgagtgcgccgccgacgttatgcgccgtgttccataatgcccaccaaccgccgcgctcggtacgactataccaggccgttaacagacgcgcacacaccggactaccccagccctggaaaaaggcgttcagcacccagagcacggcaaacgcccataggctcgtgctgaagccaaacagaatgttgataatgcccgtggcgataagccctatccccataaaataacgggcattactgcgatcgctgacaatgccggagacaaacttgctcacgccataggtaatgtaaaacagggtcgctaacaggccgatatcgctacggctgagcacgccgttagcaaggatttctggtacggcggcgttaaaacttttccgcgtgaagtaaaacagcgcgtaacccagccagatggtcagcagaatatgccgacgccagtagcgatagcgggcatcaatttcatatttatcagtcattaatggcgcatcggcaggcgctttcagaaacggcaacatcatcaaaccttagacatagcgttgaggtagagaaacgctgacacgcgtgccgtgcagacaggaaatgtgtaatgtgccacccagcgccgttacgcgctcgcgcattccggtgaggccaaaaccttgttgcccggaacccggcggcaaaccgctgccatcgtcttcaataaccagcatcaaccgttcatcctgctgccagccttgcagggtgaccgcgctggcatcagcatgtttcacaatgttgttcagcccttcctggcagacacgaaacagcgtcacgcgctggttttcgcttaacgcactttcatcgattcgccattcgagatggctgacaataccgcgcccttccagctccatttcccgcatcagactgcggatggcctgctccagggtgagatcatccaactggcgcggacgtaaccgacccaacaaacggcgcaccgcgtcgtaaacgcccaggcttagttgttcgatgagctgcccgctctgcttcacgctggcgttatctgccgccagccgctgaacaatgcccgcctgagtacgaatagcagtgatggtctgaccgatatcatcatgcagctcacgcgccacatcacggcgcacgctctcttcggtttccagcaaccgttcagccagatgctgattgcgcgccagttccttttgcaggctctggttaagttcacgcaaccgctggatgccagcgccaagcaacaaccctgtcagactttgcaccagcaggctgagcaataaatccaccggatgatcgcgccaggtttgactggcgatcagcgcgatggcgttcatcaacgtcgcaatcagcgccccttgccaaccatagtgccaggccagcgcgataatcggcagcgccagacagaatggcgtaaagcggctcagttcgtccggcaatcccaactggagccagagactgataacaaacagcagcaagtaccagaccagatgtcgcccgcgccagttgattggctgagaaaccagactcggaccgagcggcagccaggtgttattggcgagatagtgccagaacaccagacatatcggggccagcgtcaggccgccagttaaagtcagcaacagcgcattccagctctctttgccgtgccaaagccagggcaggctctgcaacaacgccgccgccgttaacgccgccccctgtaacagcaaggtgcgccagtcacgctgatggcgatagcggctgatcagcgctacgggcagtaacgtcagtaaactaccgatcatcaataacggaaaatgggttaaaccgaccgcctgcgttagccagtaaatcagcagccactccgcgcccagcaatacgggccagtatccgcgcgggcattgcagcattagccccagacgcagaccaaacggaaataacagcaccgccatatcagggcgctcaaccagatgcaggctgatactccacaggcaaaaccatgcggcagagaagataaaaaagcaggcaataacggtaattaagcgggagaacaacgtcttcatcaccagccatcaaacatgcggcgcgccagctctacgtcgttactgacgcccagtttttccatcagattggcgcgatggacgtgtaccgttttcggactcaagcccagttcggcggcaatctctttcaccgccattccttgcgccagtttttccgccacctggcgttcacgtttggttagcgggtcctgacgaccggatgccagtttaatggcaatatccggcgtcagataacagccgcccgtggcaaccgtatgcaccgcagcaatgagttcatccgggctacagcgtttggaaagaaagccgcgtgcccccgcgttaagcgcctgctcaaccagcgcaggactgtcgtgaacggagagcataatcgtcgccatacctttcggcagctggcttagcagctccagaccggagatatcgggcatggagatatcgcaaatacacacctgcacaccgcgccccggcagccccgccagcgcctcgcgcccgctaccaaactcggcaactacctgcaaatcaggttccagccccagcagctgcgcaaagccggagcggacgatgaggtgatcgtctataagggcaacggtgatcatggtcttgtcctggcgggtaaaaaaaatacgcgcttaccttaacgataagcgcgatgttgttcaagccttgagcggttactgaaaaaacaccgcgatcttgttaaacatcgtcggatcggactgattacgctgcactttcacgacatcttccagcttatcgatttggcttatcatctgctccagacgctggtcgtcattgaccagtagccagatatggcttttgtcgctgtcctgaatcggcagacaaagaatgccttcaacgttaaaagcgcggcgggcaaaaaggccacaaacgtgggtcattacgcccggatggttgcgaacggtgagctccagaattacgttgtcatgagttgtgttttgcatggcttattcccccaccatttcagtattcgccgcacctggcggcaccatcgggtaaactttttcttcggcatcaatgcgcacatggatcagcgccgggccagggcgattgatgatttcctgcaaactagcctgcggatcggcttcgttattcaaatcacaggtttcgaggccgaatccggcggcaatctgcataaagttgattttgcccggataggtggcggcaaaaacgccttgctcgtagaacagactctgttgctgatgcaccagccccagcgcttcgttgttcatcagaatgattttgacatccagctgattttcactggcggtcgccatctcctgaatattcatcatcaggctgccgtcgccggagaaacacaacactttgcgatccgggttcgccagcgcagcgccaatcgccgcaggcaggccaaaacccatcgtgcccagcccaccggaggtcagccactggcgtgggcgattgagcggataagcttgcgcggtccacatctgatgctgaccaacgtcggtggtgataattgcattgtcatcgacacaggcggcaacggcgttgatcaggccgtaatggcttaacggatcgcacgctttcgggattggacacggaaactcacgctgcaaatccgctaccaactggtgccactctgcacgcggttgcgcttccaccagcgggatcaactgcgccagcacgtcatcaacatccgcctgaatcgccacgtgcggctgcttgattttacccagctctgcacggtcgatatcgacatgaatgattttggcattcggacagaactgctcggttttgccaatcgcccggtcatcaaaacgcgcaccgagcactatcaacaaatccgcctcctgcaaaatatagttggtgctgcgcacgccgtgcatccccagcatacccaggctcaacggatgcgcttttggcaacatgcccagcgccattaaagtcatggtggtaggcagttgcgctttctccgccagttcacgcacccgtgcgggcgcattgatcacaccgccgcccagataaagcaccgggcgtttggcagcgttaatcatcgccgctgcgtcacgaatgctttcttcgctaaaggcgggggcggcggctttttctgccatagcgggctgtgtttcaatctcaaaaactgccgtttgcacatccttaggaatgtctatccacaccgggcctgggcggccactttgcgcaatgcggaaggcatcgctcatgacctgcgggagttcttcgatatgtctgaccagatagttgtgtttggtgatggggatagagatgccgtaggtgtccacttcctggaaggcgtcggtgccgatcatgctggcgggaacctgaccagtgatgcaaatcagcgggatggagtccagccgcgcatcggcaatggcggtcaccaggttagtcgcacccggtccgctacaggccatacagaccgccggtttaccgtcggtgcgcgccattccctgagcgataaagcccgcgccctgttcatgacgggccagaatatggcggatttgcgtgctttggcttaaggcatcgtaaacaggcaggatagaaccgcccggaatgcctgtcacaatcttaatgccctgctgttccaggaaatgaacgataaattctgcgccggtaaagcgcttacgcgtgcttgttgtgccgctacttgccatgctccagtccttttcttctgggccgactttccgggaggtgcttaaacgaaaaaccccgcccggtttgcgccggcggggttttggaatcgtgtgttgttccagtccttacggcgcattgccgacgaccaccaccacacgcacgacgaccactgcggcggatggcgcagttggtagtagttttgcgttgagcatggaagtagtcattggggaccttgttggttttgtgtttaacaatatttatacaagcacagctttacaggggagacaatggaaaatttttcagcaagggaaaattgaggggttgatcacgttttgtactgaattgcagataacaaaaaaccccgccggagcgaggtttcgtcagtcgcctgcggctggtaaccgcaaagcacactgtattatgtcaacactgaaagtatacgtgttccgcgcagaacgcgcaatttcggcacgaattttgacgtatttagtgcatagttgagtatcgatcacagtttgcgttttgtccaaatattactgtttatttatacagtaaacttctataatatcactgtacgcaatgtgttatgcgggggccgcatcgttacccggcgcactaagtcctggctgaaacgggtggtgccgtcagcgccttaaccccgcgtgagcacactgtgttatgtcaacaagcacaacgtttctccttgagataccgcgtgcacaacagctggcaacaggcagcggaaaggtacgtcagctggcagtgctcctgaaccacaggagacgcgtatgaacctggtggatatcgccattcttatcctcaaactcattgttgcagcactgcaactgcttgatgctgttctgaaatacctgaagtaattcagattcaagtcgcaccaaaggggagcgggaaaccgctccccttttatatttagcgtgcgggttggtgtcggatgcgatgctgacgcatcttatccgccctaccatctctcccggcaacatttattgccgcttttgtttacatattctgccgctaaacaattccccattcctggcgtatatctggctaacattcatcaatgtgatagattcctctcccgcatttatgggaatgcgtagtgacttattctaattatttttataaaagcatccgtgataatgaaaaggcaaagaaacgtcaatttgttattgatgttggtattactcgtggccgtcggtcagatggcgcaaaccatttatattccagctattgccgatatggcgcgcgatctcaacgtccgtgaaggggcggtgcagagcgtaatgggcgcttatctgctgacttacggtgtcagtcagctgttttatggcccgatttccgaccgcgtgggccgccgaccggtgatcctcgtcggaatgtccatttttatgctggcaacgctggtcgcggtcacgacctccagtttgacggtgttgattgccgccagcgcgatgcaggggatgggcaccggcgttggcggcgtaatggcgcgtactttaccgcgagatttatatgaacggacacagttgcgccatgctaacagcctgttaaacatggggattctcgtcagtccgttgctcgcaccgctaatcggcggtctgctggatacgatgtggaactggcgcgcctgttatctctttttgttggttctttgtgctggtgtgaccttcagtatggcccgctggatgccggaaacgcgtccggtcgatgcaccgcgcacgcgcctgcttaccagttataaaacgcttttcggtaacagcggttttaactgttatttgctgatgctgattggcggtctggccgggattgccgcctttgaagcctgctccggcgtgctgatgggcgcggtgttagggctgagcagtatgacggtcagtattttgtttattctgccgattccggcagcgttttttggcgcatggtttgccggacgtcccaataaacgcttctccacgttaatgtggcagagcgttatctgctgcctgctggctggcttgctgatgtggatccccgactggtttggcgtgatgaatgtctggacgctgctcgttcccgccgcgctgttctttttcggtgccgggatgctgtttccgctggcgaccagcggcgcgatggagccgttccccttcctggcgggcacggctggcgcgctggtcggcggtctgcaaaacattggttccggcgtgctggcgagcctctctgcgatgttgccgcaaaccggtcagggcagcctggggttgttgatgaccttaatgggattgttgatcgtgctgtgctggctgccgctggcgacgcggatgagccatcaggggcagcccgtttaagcgcacgtcaccgcagcatcgtcatcagctccatgggagaacgatgctgctttatcagatcacgcatcacccgcatatgcggtgcggagtaagaataaaacgcctgatagcccgcacaaagcacgctgtctggcgtctcctgccgagcgtgcgggcacaggcgatgccagtcgcacgcctggcagtcacagcgcggttgcgggttttcgctgccacaccatttttgtaaggtggcgtcaaaaagctcaatgctgatacgactgatatctgcccgcacccaacactcgaacagggcaattaaaaatttcccccacagctctgctgtcacgctagcggccgtcagatcgccccggtcatcaaattcaagatagggaatgagctgtacggagcggatgccccgctgtttgaaattgtgataaaaatcggcaggttgcagagcatccttgtactctacaaccagtttatgcctgtcctcttcagcatcaatgacctgacttcctgtcatgcgactctctcaataaatacgataagttgatgtatatgcgttacagcaaacagtattgcgagagataacaccgcgagggagatcaaaaatttgtcacggactacgtgaaattgggaaaaatcgctattcgtgacatccattaaattgcgattacgggtgtagtgccagaggatcagcgccacgatggcgagaatgccaatgctaatccagaataacatgcccgcctggtgccagttgtgtttgatagccaacgccatcaacgcgccgtagcccagcatggtacgaaaccacgccagacttgtgcgctccggctgcagtcctgggtcggcaatgcgtctggctttgcggctatccggcatacaacaccagtcccataacgttaattatccggcatacaacaccagtcccataacgatcaccgccacgaccatcaatattaagctaatgattaataagctgttggtgtagggcaggtcctctttcagacgcatcgctttttcattgcgtaaccagcgcaagtagccatacatcgctaacccgccggaaaacagacacaacaacaacgccagcagttcgcgaatgacgggcgtggcgaaatctggcgcaagttgatcaagcccaacccccgccgccagaaatcctagtgcagtacggatccacgccagaaaagtacgctcattagccaggctgaagcggtaatcaggcgcttctccgaggcgggaaattttcattgttgctcctttgcaatttcactaacgctctacctttagcggtttttttaagaatttcgtccgcccgtttcctgatatgcttttgccatccgctacaaggaggtcagatgggtatcatagctcaaaataaaatcagtagtttgggcatgctgttcggtgccatcgctttaatgatggggattatccactttagtttcggccctttctccgcaccaccgccaacgtttgaaagcatcgtggcggacaaaacggctgaaattaaaagaggtcttctcgccggaataaaaggcgaaaaaattaccaccgtggagaaaaaagaggacgtagatgtcgataaaatcctcaatcaaagcggtatcgcactggccattgctgcgctactttgcgcatttattggcggtatgcgtaaggaaaatcgctggggcattcgcggcgcgctggtttttggcggcgggacgctggctttccataccttgctttttggtatcggcatcgtgtgcagcattttgctgatattccttatcttttccttcctgaccggcggtagtctggtttaagcagcctgaataatgcccgccgggtgatcatcagcgggcattatcgtcagaacttctgttttttctcctccaccttcaccccttgtgtcggtaggccggtgtcatagtcgcgtacaactgggctatagccatcttgtggacgtggacgaaacgcccccatccagcgcggccgtgcatctttacgccacggacgcagactccattggtaactgcggaacggatcgcgaattttgtccatgtaatccaataaggcgtcatgcattttgctgcgaacgtctgcaaaacggatatcatcgatcaggttatgcatttcatttgggtcattacggcgatcgtaaagttcatcactggtgaagaggttgagtaccagtttaaagtcatccgtcacccagcaacgcaccggaataaaaccgccaaagctgtcatgctcaatctcgtagcggttaaattccaccatcacgccgcgtggctctttcacggcaaggatattttcccccggcagaatctctggtttttcaatatctgccagcgccatcattgtcggcagtaaatcgatatgactgactggcgtatcgacctgtcgccgctccccttgcgggctacggatgatcagcggaatgcgggtgatgtcgtcatacatcgccgcccctttactgatcagcttatgtgcgcccatcatttcgccgtgatcggaggtataaataacccacgtattttcacgttgctctggcgttaaggcattgatgacccgtccgatttggtcatcaacaaagtcattacaggcaaaatagagcggatggtgataaagcccgtcatcaccgactgggcttggcatcgcctgcgcccataagcggtgatgttccggtttgttagccaggtcatcctgtgctttctcgcccagctcgtagtaaaaatcagcgtatttctctaaatactccaccggacaggtgaacgggtgatgcggctcatcatagctaaccaccatcaggaaaggctcgtctgcgcgcgcaggctgttgcagaaaatccaccgcccgattgctgatacgatgcgcccaggtgaaggtttcgtcgatatggttcgcctgtaaatcttcgacgctgtttaggccattgcgccacaggctaatctctttttccgtcagttcgctaagatagttcgccccatcgaaccagtaatcagcgtcccactccggcggacactcgccagtgccgaaatagtcatgaccgtcgagatgccatttgccgatgtaacaggtgtgatagccggcatccttaaagtagcgccccatagtggagatgtttttgcctggcgcgacgttgttggtccacgggccggactggttagcgtagataccggtaaatagtccggcccgtgcaggcgtacaaaccggactacaggtgtaggcggaattaaagcgaataccttccgccgccagactatcaatattttgcgtattcagcggtttaccgctatagcaaccgaccatattggtggcctgggtatcggtcatgacgaacagaaaattggggcgtttcataggctatccttcccgtcgggagtaaaggttacggctgggtcgtgacgatgccgccagctgtcaaaaatcaggtagacaatcactacggcggcaatgaaataactgatcatcgctaaccagcgcgtaccgtagccgccgaattcagccagcccggcatagacgccaatcatcgcgaacaggatgccaatactcgcgatcttgacgtttttccacggtttcatgtccaccgcaaacgcatctttgaaggtgaacggcgtggcgcgcggtttgataaaaccgatcaccagcatcacgaccacgttgatgcagaacgtacaggccagcacatagaggaaatggaagtcgaacttcaccagatagttgatggtgatgtagctgattatgccaatccccatcgctacttttgccgccagcgccgggatgcgcgggaagaaaaagcccataatgatgatggtaaccagcggcacgttgtaaatgccgttgagctgtttcatccagctatacagcccctgcggcgcgttggcgatccacggcgcgaccagcacgctaacgatagcgataaagaaaccaaatttgcgcccgacggtgaccagctgctgcggctcggcattctggttaatgatgcgacggtaaatacccatactgaataacgtactggcgctattcagaaagccgttgaaggtactgatcaccgcaccaaataacaccgcgccgaagaaacccaccattggcactggcagaacgttattgaccagcgtcgggtaggccatgtcggctttcggtaaatcctgatacagatgaaacgcaatcaaccctggcagcaccagtaccagcgggtcgagcattttcagcaccgccgttaacagcgcccccttttgcccttccgccaggcttttactcgccagcgtgcgttgcacgatgccctgatttgtacaccagtaaaaggtgttcaccagaatcaaaccggtaaatgccgcgccaatcggcaagggatcggtcgggccaccgatactgtttaatttctcggcgtgaacggtggtgagttgctcaatgccctgcataaagctgcccttgcccatcgcgattaggccaaataccggcaccatcaacccgccgataaccagcccaataccgttgatggagtccgccactgccattgcgcgcagtccgccgatcaccgcatacaaaattcccgccagaccaagcaaaattaccagtagccagatagccgcaccgtgagaaatctgtaggctttccccgacgtgaaacaggctgttgagcgccaacgcgccggagtagagaacaatcggcagaaagcagacgccggtggcaattaggaagcagaagtcgatgataatacgcgtcgttttatcataacgttcctccagaaaatcggggatggtggcaatgccgcgcttcagatagcgcggtaaaaagattagcgcgaggaagatcagcgtcaccgcactagtcacttcccagcccatcacgctcatgccgcttttgtaggcctgcccggaaaggccgaccagttgttccgtggaaaggttggttagcattaagctagcggcaataaccggcgcttttagactacgtccggcaagaaaatagccttgttggcttccggtatctgttttgcggaccttccaccaggtgatcaccgccaccagcagcgtaaaaccgacaaaactcaagatttgtaagctattcatctcatagcccttatttatgtttatgtcccggacgcatgaatatagggagaggtaaaatgcgtcgggtcaggcagtcagattcttaaaatacaaacgtcgtatccctgaacggattgttttctgttaagttcaggttgtgagcataattcgccggagggatattaaaatgaatggaaaattgcaaagtagtgatgtaaaaaacgaaactccgtacaatattcccttattgattaacgaaaatgtgatctccagcggaatttctctgatcagcctctggcatacctacgccgacgagcattaccgggtgatctggccgcgggacaagaagaaaccgcttatcgccaacagttgggttgcggtgtataccgtacaaggatgtgggaaaattcttttaaagaatggcgaacaaataacactgcatggcaactgtattatattcttaaagccaatggatattcactcttatcactgtgaaggtttagtctgggaacagtactggatggaatttacccccaccagtatgatggatattcccgttggtcagcaaagcgttatttataatggcgaaatttataatcaggaactcaccgaagttgctgagttaataactagtccagaagcaataaaaaataatctggcagtcgcttttctgacgaaaattatttatcagtggatttgtcttatgtacgcagatggtaaaaaagatccacaacggcggcaaattgaaaaattaattgccactttacatgccagtctgcaacaacgctggagcgtagctgatatggctgccacgatcccctgtagcgaagcctggttgcgtcgtctgtttttacgctataccggcaagacgccgaaagaatattacctcgatgcgcgtctggatctggcgctaagcctattaaagcaacaaggaaacagcgttggcgaagtcgctgatacgctcaacttcttcgactcctttcatttcagcaaagcctttaaacataaatttggttatgcgccgagtgccgtgctaaagaatacggaccagcacccaacggatgccagtccacacaattaacgtaactctggccagtacgctttgttggcctccagcaactcatccagaatagctttggcgacgctggcgctcggtaccgttttgctcaacgtaatcgcctgccacaggtgctgataactacgctgttcccaggcgtccacgaccagtttttccaccgccacttgctgactcattaaccctttctgaaactgcgggatatcgcgctccaccagtggttcaggccgtagtagcgcacgcgcatctgtttgcgatcttgcagcccaacaatttgcgccatccggctttcaataccgattggcatgtcacagatgttgaggattttcgcattcgggcgcagacgacgcgtggcttctgcgacaatggctgccgggttggagtagttgagcatccaggcatttggactatatttttccatataatccaccagttccaggacgccgccaatggaacgcatgccgtacgctattccgccgggtccgcaagtttcctgaccaacaacgccgtggcgcagcgggattttttcatccagttcgcgcatcgggtatttgccgacgcggatgtgcgccatgacaaaatcaacgtcgctgaatgccacttcaggatcggtggtgtaactaaacgcaatgtccggcgctttttctttaaggatgactttacaggcttcggcaatcacttcctgccgcgcaccatcgttatcataaaatttcagtgcacgaagcgggaaacggtcctgattcgccaggagcatcaacacgatgcctggcgtaaaggtgcttccaccgcctgcgacaaccacactgaatttggtcattatactgcctccgtaatggcaacattttctgcactttgatgagaattaattaagctatcgagctgttcacgcagctgagatacatgcagaccaatgatcacctgaatggcatcgccactacggaagacgccgtgcgctcccagctttttaaagacttcgtcatccagcgtttgactcatgtcatgcagtgcaatacgtaaacgcgtcgcgcaattgttaatgctggagatattgccgaccccgcccagggcttgcaggataccggcagcctgatccagctctttttttggctctgccgcggtggtttggcctcggctggctttgtattcggctttactgtagagtttcacttccgcatcttcacgtcccggcgtgcacatgttgaactgcagaatcagtgtgcggaaaaccacgaagtacagcagggtaaagcacaacccaatggcgatttgggtcagcatcatatccgcgtggttgctgaacatcgggatccagttttgcggtaaaacttagtcaatcagacctccgcccatgttgcccaccacaccaaagagatacattacggtgctcatactggccgccagcacggcgtgtaccgcaaacagcaacggactaatgaacaggaaggtaaattccagcggttcggtaattcccaccagcatggcggttaaggttgcgggaatcagcaagcccgccacttttacccgattttccggtgcggcagtgaagtacatcgctaaagaaatgcccacggcaccaaagattttactgttaccgtgcagggcaaaaccgccttccgggaacaagcttttcagcggctcggcgctcaaactgaactcttgcagatgctgcgcccagtacatctgaatgccgccttcaacagctgccggaccaaagataaactgtccgtagatgaagtggtgtaaaccggttgggatcagaatacgttcgaggaaggtgtaaacccagaccccaagtgcacccgcgctacgcaggaacgcttgcagagattcaatccccatttgtacttttggccagccgagcaacgtcagccaggcacaggggatcatcaccaggaaggcgataatcaccacataagacgtcccctggaaaatgccgagaaaaaccggcagttttttatcgaacagacggttatgcagcgccgtcacaatgccggaaatgataattgcgccgataatgctggtatcgagggttttaatcccggccatcattgtcagaccgctacctgccaccgcgtcctgagtgaaatcgacgccgaagtagcttccccaggtcattcccatcgcgttgatgaaatagttccaggtcaggaaactcaccatcaccgccagacaagcacgcccctgcgcttgcttagcaaggccaatgggtaaaccgacagcaaaaatcagcggcatattacggaataccgtccaaccgccctcttcaataatgtgtacgatttgcgcgaataaactgttcggatcggtcagactttccccgacaaacatcgggttttgcagcaagatggcaagacccaccacaatcccggcgaagggaaacagcagcactggcgtgaacatcgcgccgccaaagcgttgaatttgactgagcatttccacatcctcttttctcaattctgtaagtaggaagcctgattggttatgcggcaggcctggagcgaggataggaagatgcgatcggcagaacatgacgacccaatgggattcgtgatcgctttcatgcttttcgttgggcggtagagatctacgttttcgcgaaaaagtagacctctgtgagcacaggtacacagcatcgaacacatctttaaaaaaaagatgttttttcaatcgattaagcagaacttgtgtgcgcattacccgggcttgcaggcaaaaaagagatctagagatgatctacaaaagcattgcggagcggttaagaattcgacttaactccgcagatttcacgctaaacagccttcttcccggtgaaaaaaagctggcggaagagtttgcggtaagccggatgaccatccgtaaagccattgacctgctggtagcgtgggggctggtggtccgccgccacggtagtggcacttacctggtgcgcaaagatgtactgcatcaaaccgccagtctgaccgggctggtggaggtgttaaaacggcagggaaaaacggtcaccagccaggtgctgatttttgaaatcatgcctgcgcctccggccattgccagccagttacggattcaaatcaacgagcagatctacttctcccgtcgcgttcgttttgtggaagggaaaccgctgatgctggaagacagctatatgccggtaaaactgttccgtaatcttagcctgcaacatctggaagggagcaagtttgaatatattgaacaagagtgcgggattttgattggcggtaattatgaaagcctgacgccagtgctcgccgatagactgctggcgcggcaaatgaaggtagcggaacacacgccactgctgcggatcaccagcttgagttatagcgagagcggggagtttttgaattatagtgtgatgttcagaaatgccagcgaataccaggtggagtaccatttacggcgactccacccggaaaagagttaaccgatactccagaagagcaccgccagtaattggggggtgataatgcgcaggaacattaccaacggatagacagtggcgtaagagagcgccgccgcaccgctggttggatgaagattattagcaaacgccagcgccggaggatcggtcatggaacctgccagcatcccgcacatggtcaggtaattcattttggctaacatccgcgccagaatgccaacagtaatcagcggaacggcggtgatcagggcaccataaccaatccagcttagcccttcgccattgaccagggtattcacaaaatccccaccagatttcagaccaacgacgctgaggaacagcacgatccccagctcccgcagcgcgaggttggcgcttggcggcataaaccagtacagcttgccgatactgccgatacgcccgaggatcaacgccataatcagcggtccgcccgccagccccagtttcaacgcggccgggaatcctggcacaaagacgggaatagaacctaacaatacgcctagcccgatgccaataaacactggcagcatctgaacctgttgcagtttttgctgcgcattccccagcacattggcaacggcatcaattgcggacggacgccccaccagattgaggatatcgccgaactgcaggctgatatcgccactggcgaccagttcgaccccggcacggttcaggcggctgataacaacgtcatagcgttctttaaagtgcaggtcgcgaatacgttttccgagcacgttttcattggtgaccaccacacgctcgacgcgcaaatcagtgcctttcgtggacaggctagtatcgacctcctgaccaatcaccagttgcgcattatgtaaatccgctggctgacccaccagatgcagcaaatcgcccagttggataatggtatctgggctaggaacttttagggtttcttcgcgtttcagacggctgcagataattttgtcgccgttgagaatcggtacatctttaatggctaaatcatgcaggttagggttctcaacgcgaatattgatagtcttgatcagcgcgccgccattggtgcgactagactcgtgctgctgagcttctgtctcgacattgacgcggaaaataacccgcaacatccacatggtgaacaaaatcccgcaaatgccgaatggatacgccatcgcgtaactcatccccatctgatcgaccatttccattggtgtacccaggtcgcgcaaaatctgctgccctgcccccagcgctggcgtattggtaaccgcaccggagaaaatccccagcactaccggcagtggaatatcaaacagtttatgcaggatggcggtaaccagaccaccgatgatgacgatcagaacagcaaacaggttgaggcgtaatccggagacgcgcaaactggcaaagaagcccggccctacctgaatcccgatagtataaacgaacaggatcaggccaaattcctgaataacatgcagcatatcgctacttaatgtcatccccgcctgagaaacaaaatggccgacgatgatcccaccaaacagcacgccgccaatacctaatcctatgccgcgaaatttgacgttgccgataaacaaaccgacgactgccaccaaagccagaatactgaccgttaatgctatatcactcatcgtccatttctcttgagataacattttaattgctacggattatggctgaatcggtgaagcagatttgccttatagcgcacattatcacgggaaagaacgtgccgaaatatcttaaacagtcgaaatttaacgcattgttgagtaagtaagacaaaaaaagccccaccagaatggcggggcaaagagaatagctagttagctatttaacgcgggacgttcgctgatagcgatacgctgcgctgcgatgggttcaggctcattacgaattaaatcaatatgcagtaaaccgtttacgaaggttgcgccagagacttccatattttcagccagcgtaaagctcaggctaaatggctgattcataagcccttgatgcagccattttttctcttcttttggctgctccggcgtgccttttacgctcaggcgcgtaccttccagttgaatctctaaatcttcctgacggaaacctgccagcgcaagggtaatgcggtagtggttatcgtcgcttttctcaatgttgtacggcgggaagctctggctttcaccggcgttttgcagtgcgttggccagtttgtcaaaaccgatccattgacgcatcagtggggataaatcgaagttacgcatagtcatttctccttctaagaagcgagtaagtacctgcaaatccgaagattcgcatatgctccctgacggcgagcatggagatgtcaggccgcgccaggcggccttagggaattagttgatttcgatacggcgcggttttttcgcttccggaatcacgcgttcgagatcgatatacagcaaaccatttaccaggttagcaccacgaacatgaatgttctcagctaactggaatttgcgttcaaagttgcgttcagcgatgccctggtacagataggtgcgctctttttgttcgtcggcgtgagcacctttcaccaccagcagattatcctgggcggtaatttccagttcgctctcagcaaaaccagccacagcgatagcaatgcggtaatggttttcgtctaccagttcaacgttatacggagggtagccgccattactctggctctggttgttttctaagtggttaaacaaacggtcaaatccaatagcagaacggtaaagcggggataaatcaaagttacgcataatcaatagctcctgaaatcagcgagaatgtaagaccttccacaatggacaggtcaggtagccagaacacccatcaggcgcgtcctcatcggctacgatgtaaaaatgggtctggaaatgaacttttcaagccttatcagcggacttttttttgcagtttatggtctattgcatagactgagggggcagcacgaaacgttaaagtgcgatagccgccacagtgcgacgtaatgatgatgttattttcagcaagggatcgctataactcatcaggccaacacccacgatcaacagatgaatttattatgataagaaatgtgttgttagcgttcatgatatgcagcggaatgacattactcggaggatgctccagcgtgatgtcccataccggagggaaagaaggaacgtatcccggcacccgcgccagcgcaaccatgattggcgacgatgaaaccaactggggcactaagagcctggcgattctcgatatgccgtttaccgctgtgatggacacgcttttactgccgtgggatgtgttccgcaaagacagcagcgtgcgcagccgcgttgaaaaaagcgaagccaacgcgcaagccaccaatgcggttattccaccggccagaatgcctgataactgatttagcgatcagtttcggtgatccacagctggccgccttccatccacgccagccactgaccatccgggctgaagaccacggcgtccgcagaaggactattggcgtggtgttcggttaaatactcaacctcgccgctttgcgcatgggcacaagcaattcgattatccagcacaaagcccaaccattctccactcggatgccagttaaatgcagactgaatatccgttttgttatgggttaactggcgcggctcgccgccctgtgggctgataagccacagttgcacaatgccgttatcatctcgcattaaaaacgcgatttgtgtaccctgcggattacagcgcacccagtggcgcgggacgttgactaaccccggataagcccgatggtgggtaaaggttaaacgtcgctgcacgacgccacgcggtggcgcgggcagggttgtttccgttccgcttaacggcgcatcacctgccgctttccagccagcttcatcttgcggtaactcaacgataaacagctccggcactttctcgccctttgggctaagtgtgtcgccaataaatgccagcgcgtgatttcctacccatccttcttcataagcacgattgatttcatcactgccaggctgtggcgtgggcgtggttttgctcaccagcacgcaccagtggctaccgctgtattcacgcggatgctgcttttgtacgttgaccgggccaaacggcgcagcaacaccgacgtttcgcaaatccagcgccggatcgagttcatgcattacatggtcgttataggtaaagctcaccctttcaccgttcgggctaaagacatgcacatggctgccgccgcgcagcactcctggcgtatacggcgcggtaatatccatcgcatcaaggttactcatcttgccgccttcaacaatcactccgcgccgatgatggaagtcgtaatgccatgtttcatcaggattttccgggccgtggatgaaaacatatttctcactcttcggatgaacggtcaccacgccgacgtgtgcgccctgactcgcgcgatagataacctcgacctcgccggtatggatattcacacgctcaatggtctcgccggtaaagctcgcgccagaaggacgcacgtcaaataccagccactggctgtcgggcgtccaggtattggtattggtgagcaggtgattacggggagcaaaggttatctgtttcatggcgcggtcctgatacaaaacgggtcccgccatcatacttcacaaggacttcactttcagacaatagtcttttgccatcgtgatgaatgtgagtgaaaagatggaacatttcgacgtggcgattattggcctcggcccggcaggaagcgcgttggcacgaaagttagcaggcaaaatgcaggtgatcgcgctggataaaaagcaccagtgtggtactgaaggtttcagcaaaccctgcggcggtctgctggcaccggacgcgcagcgatcttttattcgcgatgggctgacgcttcctgtcgatgtgatcgctaatccgcagattttcagcgtcaaaaccgtcgacgtcgccgcaagcctcacgcgtaactaccagcgaagctatatcaatattaatcgccatgctttcgacttgtggatgaaaagcctgatccccgccagcgttgaggtttatcacgacagcctgtgccgaaaaatctggcgtgaggatgataaatggcatgtcatttttcgtgcagacggctgggagcaacatattaccgcccgctatctggtcggtgccgatggcgcaaacagcatggtgcggcgacatctctacccggatcatcaaatccgtaaatatgtcgctatccagcagtggttcgcggagaaacatccggtgccgttctactcctgcatctttgataatagcataactaactgttatagttggagtatcagcaaagacggttattttatctttggcggtgcctatccaatgaaagacggtcagacgcgtttcacgacgctgaaagagaaaatgagcgcctttcagttccagtttggtaagacggtgaaaagcgaaaaatgcacggtgctgtttcccagccgctggcaggattttgtctgcggtaaggacaacgcctttctgattggtgaagcggcgggatttatcagcgccagcagcctggaggggattagctatgcgctggatagcacagacattctgcgtagcgtgttactgaagcagccagagaagctcaataccgcttactggcgcgccacccgcaaactgcgtttaaaactcttcggcaagatagtaaaaagccgatgcctgaccgcaccggctttaagaaagtggattatgcgcagtggtgtggcacatattccacagttgaaggattaaccaacgcgcttcacatcgcccaccagcaggatataagagagcgcgccaatcaacgcgacggcggagatataaaccagtgcaggtgcgaaaccgtaaccctgcgccaggtaccccaccaccagcggaacggtgatgccgcccagaccaccggcgaagttaaacacgccgccggttaaaccaatcaggcgcatcggtgccagagaagaaaccaggctccaggtaatgctagcaaaaccgttaccgaagaatgccagcgccatcaggcacataatcatcatcggatcgttagtgtagttagcgcccataatgcaggtggagatcagcaagccgcagataatcggcgttttacgcgcaaagcccagactaaagcccttacgtaccagcagatccgctacccagccagagagcaggacgccgacaaacgccgcgaggaatggcaccgtggtcataaagcctgctttcagcgccgtgattcctttttcctgggttaaatagttcgggaaccaggttaagaaaaaccacagtgtagaagccaccgcaaattgcccaagataaacgccgatcagtttacgatggaacaccagtttccagtctttggctgttaacggctgacgcgcctctttcttcaccggcgcatcaccatccaccagaccgccgccatcacgaatgtaatccagttcagctttgctgatacctttggtcaggcgcggcggctgataaaccttaaaccaaatcaggctccagataatgccgataccaccagtgacaatgaacacccagtgccagctcaacatctcctgaatccagatcagcagcggcgtcagaaacgccagaccgacaaactgaccagacgtataaaaaccaacggcagaagcgcgttcatgttccgggaaccagctggtcaccatccggttattggtcgggaaagcaggcgcttcgaaaataccggttatcgcgcgcagaccaattaaactcattaagcccgtggcaaagccctggaataaagtcgccacactccagccaaatatcgcaataaaataagtcacgcgagaacctacgcgatctaaaaaccaaccgccggggatctgacatagcgtataaagccaggcgaaggcgctaaatacatagcccatttccgctttggtaatgccgaactcttcctgaatatgggcggaagccacggccaggttggcgcggtcgacataacaaatgactaccgtaataaagatcatcaccagcgtcagataacgccgacgccccggctttgctgcattaacgggaatatccatagcgagctttctccagattttgggcatagcgaagccgctcaccatgccctgtaatttacagagggttatatttttgtattgctgttttagtgcccgatgaggggcttacgtggcaggaattaccactctgctacgctgttatcttcatgacgccagagcggattacgccagtccggggcatttttactgaactcaatcactttagcttcgtcgatttccacgcctaagcccggtttcgttaacggtttaaagaagccgccgaccatgctgaagtcttctttgtttttcacaaagtcgagtaactccgcgcctttgttgtaatgaattcccatactttgttcctgaagtacggcgttataggaaacaaagtcgatatgcaggcaagccgccagtgcaatcggtccgagcggacagtgcggcgcaagggtcacgtcataggcttctgccattccggcgattttgtagcattcggtaataccgcccgcgtgggagagatccggttgcagaatgctaataccacctgcctccagcacgcgtttaaaatcgaagcgactgaacatgcgttcacccgccgccagtggaatatgcgtttgtgccgccagtttcgggtagtattcggcttgttccgccagcaccggctcctcaataaacagcgggcgatacggctccagttctttaatcagcactttcgccatcggcgcgctgacgcgaccgtggaaatcaagaccaaactcaatctgattgccaaaagcttcacgaatttgtgccacggtgttaaccgccgcatctaccgcgcgggagttatcaattagccccagttcttcacaaccgttcagtttgaaggtatcgaagccgatttcgcgtagcgttttaatgccgtcgataacatccgccggacgatcgccgccaacccaactgtaggctttaattttgtcgcgaaccaggccgcccatcagttgccagaccggcgcattcagcactttacctttgatatcccataacgcctggtcaatcccggcgatggcgctcatcaggatcggaccgccgcgatagaatccggcgcgatacatcacttgccataagtcattgatgcggcttggatcctgaccaatcaaatagtcacccagctcgtgaactgccgcttccaccgtacgggcgcggccttcgatcacgggctcgccccaaccgaccacgccttcatcggtttcaattttcaggaacatccagcggggaggtaaacgatacgtggtaattttggtgattttcattgcactgcctctcgatacgccttaacaaatgctgctgcctgctgcgcggtgcgctctacggattgcccggcgcgatagagatcgctgcctaagcccgcccctgcacaacctgcgtctatccactgcgccaggttttctggcgtcacgccgccaacggcaaagactgcgatgtcgcttggcaataccgcttttaacgctttgatgtattgcggaccaaaagcgctactcggaaatattttcagcgcctgcgcgcccgcttcgagcgcggtaaaggcttcggtcgccgtcgcgcagccggggcagacggtcatgccgtagcccaccgcacggcggatcacttcactatggatattgggcgtaacgatgagctgacagcccatcctggcgagcgcatcgacctgttcaggtttcagtaccgtacctgcgccaatcaacgccttgtcgccgtacgcatcaacgatggcgggaatgctttgctcccattgtggggaattcagcgggatttcaaccgcgtcgaacccggcgtcaatcaccgcgccaacatgcgccagcgcctcgtcgggcgtaataccgcgcaaaatggcgatcagcgggagtttagtttgccactgcatgagcgatgctccttataccagcctgaaatgccgtgtcgcccgccaccgccgtcacgtcgcaacccatcgcctgaaaggcttgctggtagcgcgcggtcaggcttgttccggcgacaagggtgatggcgtgttgatgggccacatagtcgcgcatactggcgacctctgcgccaatcaacaaaccagagagaaattcgctgacctgttcgcggggaagtgttcccagcacatggctggcgcgaacttcaaaaagctgcggcaatatggcgggcgtattaagaccacgctcaaggccagctgtgaaggcatcggcagagttttcctgcggcggcaaacctgcgccaatcaaactgtgatttaacagtaaatgatgtaattcaccggtcatcacggtgcgaaaatcgttgatttgctggctatcggcctgcacccatttgcaatgggttccgggcatgacataaagagaggaaggagccagagctcgcgcgccgatcaattgtgtttcttcgccgcgcatcacattgtggttatcgtcatgagagacacataatccgggaataatccagatattgtcgccaacactcgttaattgttcgccaatagagctaaaacaggcaggaacagataaatacggtgcaactttccagccgacgttgctgccaaccattcctgccattaccactggcgttttctcttcacgccagtcggtcgtgacttctgctaacaccgcagccggagattttccgttcaggcgcgtgacgcctgcttcactttgcctgctctccaggcagtggtcgccctgataaagccaggcgcgcagattggtgcttccccagtcaattgcgatgtagcgagctgtcatgtgatttcctttaaccttcgtgtgctgctggcgatcatggtaagcgccgcctgctctgccgcatcgccgtcctgatgtcgtatcgcatcgaacagcgccttatgttcctggagcgtttgcggcatgttggcctcatcgcccatccaggttcgttcaaaaaccgcccgctgcaggctactgatcgcaatgctaagttgctgtaacaccgggttatgcacgctctgcagcaccgcctcgtggtagcgaatatccgcttcgttaaacgcttcgcggtcctgattgttggcaatcatctcgttcagcgcgctttcaatctgcgccagatcgctggaagtcgcgcgctctgctgcccaacgggcaatcgccggttccaccagatttcgcacttcgctcatggcactgataagccgtgggtcgtagtcattttccagcacccattgcagtacgtcagtgtcgaggtaattccactggttacgcggtgccacaaacgccccgcgataacgtttcatttcaatcagccgcttcgccatcaggctacggaacacctcacggatgatgttgcggctggttgcaaactcctcacagagttccgcctcagccggaagcgggctgcctggcacgtatttgccgtgaacgatctgtttacccagcgtaatgacaatgcgatcggttttattgagagtcatggagagtccttgtgctctgtatgttcttctctactttaccccgatcgatgcataacgcggcaactttgtagtaccagcgtgatgacgttcgcgtttgccgtgcgtgtaatgtagtacaaacttatattgttgtactacaatttagatcacaaaaagaacaatgcataaaaaaatgacatgcgtcgggcagaaatctgaaaagggatatcaggcgctaaacaggagggaaagaagagtatgctttcaacggcttagctactcgtttaaaggattaatcatgaagttgaattttaagggattttttaaggctgccggtttattcccactggcgctgatgcttagtggctgtatcagctatgctctggtttcccataccgcaaagggtagtagtggaaagtatcaaagccagagtgacaccatcactgggctaagccaggcaaaagatagtaatggaacaaaaggctatgtttttgtaggggaaagcctggattaccttatcactgatggtgccgatgacatcgttaagatgctcaatgatccagcacttaaccggcacaatattcaggttgccgatgacgcaagatttgttttaaatgcggggaaaaagaaatttaccggcacaataagcctttactactactggaataacgaagaagaaaaggcactggcaacgcattatggttttgcctgtggtgttcaacactgtaccaggagtctggaaaacctaaaaggcacaatccatgagaaaaataaaaacatggattacagtaaggtgatggcgttctaccatccatttaaagtgcgattttatgaatactatagtcccagaggcattccggatggtgtttccgcagcattactgccagtgactgttacgctggacatcattactgcaccgctgcaatttctggttgtatatgcagtaaaccaataatcagtaagcgggcaaacgcgtttatgctgtttgcccgcccacagattaattcagcacatacttctcaatagcaaacgccacgccatcttcaaggttagatttggtgacaaagttcgccacttctttcacactaggaatagcgttatccatcgccacaccgacgcctgcatattcaatcattgcgatatcgttttcctgatcgccaatcgccatgatttcttccggtttaatacctaacacgtcggccagacttttcacccccgtacctttgttaacgcgtttatcgaggatttcgaggaagtacggcgcacttttcagcacggtatatttctctttcacttcctgcggaatacgcgcgatagcctggtcgaggatggcgggttcatcaatcatcatcactttcaggaactgggtattggggtccattttctccgcttcgcagaacaccagcggaatggtggcaacgaaggattcatgcaccgtgtagtagctgatatcacggttggcggtgtacagcgtggtgcggtccagggcgtggaaatgagaaccgacttcgcgagagagtttttccaggaaacgatagtcgtcatagctgagagcagtttgcgccacggtgctaccatcagcggccttctgtaccagcgcgccgttataagtaatgcagtagtcgcccggctgttccatatgcagctctttcaggtagttgtgcacacctgcatacgggcgacccgtcgttagcacgacattcacgccacgggcgcgagctgcggcaatcgcatttttaacggcgggactaatggtgtgatcgggcagcagaagggtgccatccatatcgatagcaatgagtttaatagccatgagttccccaggtagattggttcctgacccatgctaacgcgattccgctcaaaaatcagtacaacacccgagggaaaagggggatgcaacgcgcgttgcgtgctccctttttgcttagcggaagagtttccctttcagcagttccatgcctgcggaaagcagatcgttattggcttgtggactcacttcaccttgcggactgagcgcatcaataatcttcggcaattgttctgccagtaaactggaagctgtactggtatccacgccaagtttttgcccgagatcggacaccgcatttgtgccgagcgcgctttccagttgctcgccactaacgctttgattgccctgttgattactcagccaggtactgagaatggcccctaagccgccactttgcagtttttccagcagcacctgaatgccgccctgctcctcaacccaacttaaaatagcctgatatttccccgcatcgcctttcagaaaggcaccgacaacttcatcaaaaagccccatgataatcacctgtaaagcgttacgtgttgacccaaaaagtatagatttgcgggatgataattgcggattgcagaaataaaaagggcggagatgatctccgcccttttcttatagcttcttgccggatgcggcgtgaacgccttatccggcctacaaaatcatgaaaattcaatacattgcaagattttcgtaggcctgataagcgtagcgcatcaggcacgctcgcatggttagcgccattaaatatcgatattcgccgctttcagggcgttctcttcaataaacgcacggcgcggttcaacggcgtcgcccatcagcgtggtgaacaactggtcggcagcaatcgcatctttaacggtaacgcgcagcatacgacgactttccgggtccatagtggtttcccacagctgttccgggttcatctcgcccagacctttataacgctggatggagaggccgcgacgggactctttcaccagccagtccagcgcctgctcgaagctggctaccggctgacgacgctcgccacgttcgataaacgcatcttcttccagcaagccacgcagtttctcacccagcgtgcagatacgacgatattcgccaccggtgataaactcgtgatccagcggatagtcagtatccacaccgtgggtacgcacgcgaacaatcggctcgaacaggttttgctcagcattggtgtgaacatcaaacttccactggctgccgtgctgttctttgtcgttcagttcgctgaccagcgcgttcacccagcgggtaacggtctgctcatcagaaaggtcagcttccgtcaacgtcggctgatagataagctctttcagcattgctttcggataacgacgctccatacgattgatcattttctgcgtcgcgttgtactcagataccagtttctctaacgcttcgccagccaatgccggtgcactggcgttggtgtgcagcgttgcgccgtccagcgcgatagagatctggtactgatccatcgcttcgtcgtctttaatgtactgttcctgcttgcctttcttcactttgtacagcggcggctgagcgatgtagacgtgaccgcgttcaacgatttccggcatctgacgatagaagaaggtcaacagcagcgtacgaatgtggctgccgtcgacgtccgcatcggtcatgatgatgatgctgtgataacgcagtttgtccgggttgtactcgtcacgaccgataccacagccaagcgcggtgataagcgtcgccacttcctgagaagagagcatcttatcgaagcgcgctttctcgacgttgaggattttacccttcagcggcagaatcgcctggttcttgcggttacgcccctgcttcgcagagccgcccgcggagtccccttccaccaggtacagttcggaaagcgccggatcgcgttcctggcagtctgccagtttgcccggcaggcccgctaagtcgagcgcacctttacggcgggtcatttcacgcgcgcgacgcgccgcttcacgggcacgggcagcatcgataattttgccaaccacgattttcgcgtcggttgggttttccagcaggtattctgccagcagttcgttcatctgctgttcaaccgcgcttttcacctcagaagaaaccagtttgtctttggtctgggaggagaatttcgggtccggcactttcacggaaacgaccgcaatcaggccttcacgcgcatcgtcaccggtggcgctgactttggcttttttgctgtagccttctttgtccatgtaggcgttcagggtacgggtcatcgccgcacggaagcctgccaggtgagtaccgccgtcacgctgcggaatgttgttggtaaagcagtagatgttttcctggaagccatcgttccactgcaacgccacttcgacgccaataccgtctttttcagtggagaagtagaagatattcgggtggatcggcgttttgttcttgttcagatattcaacgaacgccttgatgccgccttcatagtggaagtggtcttctttgccgtcgcgcttgtcgcgcagacgaatggaaacgccggagttgaggaagctcaactcacgcagacgtttcgccagaatttcatattcgaactcggtcacattggtgaaggtttcgaggctgggccagaaacgcaccatggtgccggttttttcagtctcgccggtaaccgccagcggggcctgcggtacaccgtgttcgtagatctgacggtgaattttaccctcgcgctggataaccagctccagtttttggctcagggcgtttactacgctaacaccaacgccgtgcagaccgccggacactttataggagttatcgtcaaatttaccgcctgcgtgcagaacggtcatgatcacttccgccgcgcttacgccctcttccgggtgaataccggtcggaatgccgcgcccgtcatcctgtacagagacagagttatcggcgtgaatggtgacgataatttctttacagtgacccgcgagcgcttcgtcgatagcgttatctaccacctcgaataccatgtggtgcagaccggtgccgtcatccgtgtcgccgatatacatacccgggcgcttacgcaccgcatccagccctttcaggactttgatactggaggagtcataagaattgctcatcaacgtttctcgctcatttatacttgggttaatccgttattttacccttttccacggtaaacatcttgctattttcgtcgctcatgtctataacgtgttcagcactgatcgcgctgacaaagacctgactttgcgtcgcttttaagcggctggcaagcagcccgcgacgctcatcatcaagctcagaggcaaaatcatctatcaggtagagacaccgccgcccgctttcacgggtgaggaactctccttgcgccagacgtaaggcgcacatcaacagcttaagctgcccacggcttaaggtatcttccaccggcgcaccgtcggcgcgaatgcgtaagtccgctttgtgcgggccgtgcgcggtgtaggttagctggcgatcgcgttcaaaattacgttccagcacctcagcatattctgtctctttctcccagccgcgctggaaagagaaagtcagagaaaactcagggagaaattgcttacaggtatcagccatatcggccgcgataccggcgctatactccgcgcgccaggtgctgatttgctccgccagcgggatcagctctttatcccacgggcgtagctgttcgtaacgtgtcacctggcgcagcgccgcattgcgctgcttgagcaatcgcttgagattgctccaggcggtgaaaaatccgggttcgttgtgaaagcatccccagtcgaggaatgctcttctgtatttggggccgccgttgagtaaagtaaacccttctggcgttatcaactgcattggcatcaggtgcgccagttccgcgaccttatgcccgtctgtaccgtcgatgcggactttgctgtcgccctgtttgtctttggttaagccaatcgctgtctcgcgctcttcgccctgtaatcgcccgtggagaacaaacgcctcctgctcatggcgaatgacgcgaccaatctgcaaactgcgaaacgcccgaccatggccgagcgtatagatggcttccagcacgctggttttgccactgccgttggcacctaccagaaagttaaagccgggagataaggcgagatccgcggtttcaatgttgcggaaatcgcggatcaacaagcgggtgagggacattacagtctcattggcatgacaacataagccgcgctctggctggccgcatcttcaatctgcacgctggaaacgctatcggtcagcatcatgcggacgttttcgcatttcagcgcgttcagaacatccagcacataactgacgttgaagccgatttccatctccgcaccgctataggtaacgtcgaggatctcttccgcttcttcctgttccgggttgttggcggtgattttcagctggttttcgctgacataaagacgtacgccgcggaatttctcgttagagagaatcgccgcgcgagcaaacgcctgcttgagcagatcgcagccagcttccagatgtttgtccgggttcttcggcagaacgcggcgataatccgggaagcgaccatccaccagtttggaggtgaagataaagtcgccaacgtgggcgcgaatgttgttgctgccaatctgtacgcgcagcggattgtcgccgccgtcgagcatacgcatcagttcaatcacgcctttacgcggtacgatcacgctatggcttggcaaagattgaccaattggcatactacagaccgccagacggtggccgtcggttgccacggtgcgcagttcttcaccttcggtttcaaacagcataccatttaagtaatagcgaacgtcctgatgcgccatagaaaactgggtcgcttcaatcagacgcttcatcgttgcctgcggcagggtaaattcgacttcactctgccagtcatcgaggttcgggaaatccgccgctggcagggtagacaggctaaaacggctacgcccggagcgtaccagcatccgttcaccttccagctgcacggcaatttccgcgccttcaggcagaccacggcagatatcaaagaatttgcgcgccggaacggtcgtcgctcctggctcgtgtggctgaaccagcgcaacacgtgccaccatttccatctcgagatcagtaccggtcaggctcaacgtaccgtcagcaacctgtaacagcagattaccgagaatcggtagcgtaggacgaccacctaacggaccgctcacctgttgtagcggttttaataaatgctcacgttctacggtaaatttcataggtttagctactcaatgttctgattaaattactaaaatcttctttgatatcgtggctctcttcacgcaactgctcgatcttacggcaggcatgaagcaccgtcgtgtggtcacggccaccaaacgcatcgccaatctccggcagactgtggttagtcagctctttcgccagcgccatcgccatctggcgcggacgcgccacgctgcgggatcgacgcttggaaaggagatccgcgactttgatcttgtagtactccgccaccgtcttctgaatattgtcgatggtgaccagtttttcctgcaatgccagcaagtcgcgcagcgcctcacgcacgaagtcgatggtgatcgcccgtccggtaaagttggcattggcaatgacgcggttcagcgccccttccagctcacgtacgttagatcgtagacgcttggcgataaagaacgccacttcgcccggcaaacgaatgtcgttttcgtcggcctttttcatcaggatcgccacacgggtttccagctctggcggttcgatcgccacagtcagtccccaaccgaagcgggatttcaaacgatcctcaacgccgttgatctctttcggatagcgatcgctggtgagaatgatctgttgattaccttccagcagggcgttgaaggtgtggaaaaactcttcctgagatcgttctttattagcaaaaaactgaatatcgtcgatcagcagtgcatctacggaacggtagtagcgtttaaactcttcgatcgcgttgttttgcagggctttaaccatgtcctgaacaaagcgctcggagtgcatataaaccactttggcattcggcttgcgcgccataatgccgttacccaccgcatgcagcaggtgagttttacccagacccgtgccgccataaaggaacaacgggttataggcaccgccagggttatccgccacctggcgagccgccgcgcgcgccagttggttagatttaccttcaacgaagttatcaaacgtgtgtttgacgtttacgttagaacgataggtcggttctgccggggccgggacgttatcccaaccactgcgcgtagaaggcgcagcacgttgcggctgcgtttgcgccacctgtgcaggggccgcgacgttgctcgtcactgccgcttgtggcgtttgcgtcaccggtttggtgccgacttcaaaacgcagctgtggggcatccgctccgcagaaactggttagcagtccattgatattattaaggtacttgtcccgtacccaatcgaggacaaaacggtttggcgcgtacagggccagcgtgttatcgctcagttccgcctgcaatgggcgtatccacatactgaattctgtggctggtaactcatcctgcaatcgggcaagacactgctgccaaaggctaagactcacggcggactccactcgaacaaaagtcgataatgactaaggctgaaacattcatgattgttgacgtacgtcgaaaagaccctgcttgagggtgacgcacgaaccgctgtctgcggttatatgcccgatcaagatcctgcaaaacgatcgggaccgcggatcatagcctaaactgcgcaagagatcttctgtttctcacagattttcccgatttatccacaggactttccagaactcgctaagtgtaaacgatcctgccgcgaggcgggcacgatttacgccgcatattggaaaatttaatgaccatagacaaaaattggcttaatcgatctaataaagatccaggacgatccttgcgctttacccatcagcccgtataatcctccacccggcgcgccatgctggtttccactggtgtgaggtcgtacattttccctgcgaaaaggtgcggaaaagcgcggtaaataaggaaagagaattgactccggagtgtacaattattacaatccggcctctttaatcacccatggcttcggtgtccatcgtttcatttttcggcggatatccaataaagccattgaatttattcaagtttaggtagaaatcgccatgaaacgcacttttcaaccgtctgtactgaagcgcaaccgttctcacggcttccgtgctcgtatggctactaaaaatggtcgtcaggttctggcacgtcgtcgtgctaaaggccgcgctcgtctgaccgtttctaagtaataaagctaacccctgagtggttaagctcgcatttcccagggagttacgcttgttaactcccagtcaattcacattcgtcttccagcagccacaacgggctggcacgccgcaaattaccattctcggccgcctgaatagcctggggcatccccgtatcggtcttacagtcgccaagaaaaacgttcgacgcgcccatgaacgcaatcggattaaacgtctgacgcgtgaaagcttccgtctgcgccaacatgaactcccggctatggatttcgtggtggtggcgaaaaaaggggttgccgacctcgataaccgtgctctcagcgaagcgttggaaaaattatggcgccgccactgtcgcctggctcgcgggtcctgacttaatcggaagcgttggaaaaattatggcgccgccactgagccctggcagccgggtcctgatagccctcattcgggtctatcaacgcctgattagtccgctactcgggccgcattgtcgtttcactccaacctgtagtagctacggaattgaggcattgcgcaggtttggagtgataaaaggcagttggttgacggtgaaacgcgtattaaaatgccaccctttacaccctggtggtgacgatcccgtcccgcccggaccatttgataccagagaacactaacgatggatagccaacgcaatcttttagtcatcgctttgctgttcgtgtctttcatgatctggcaagcctgggagcaggataaaaacccgcaacctcaggcccaacagaccacgcagacaacgaccaccgcagcgggtagcgccgccgaccagggcgtaccggccagtggccaggggaaactgatcagcgttaagaccgacgtgcttgatctgaccatcaacacccgtggtggtgatgttgagcaagctctgctgcctgcttacccgaaagagctgaactctacccagccgttccagctgttggaaactagtccgcagtttatttatcaggcacagagcggtctgaccggtcgtgatggcccggataacccggctaacggcccgcgtccgctgtataacgttgaaaaagacgcttatgtgctggctgaaggtcaaaacgaactgcaggtgccgatgacgtataccgacgcggcaggcaacacgtttaccaaaacgtttgtcctgaaacgtggtgattacgctgtcaacgtcaactacaacgtgcagaacgctggcgagaaaccgctggaaatctccagctttggtcagttgaagcaatccatcactctgccaccgcatctcgataccggaagcagcaacttcgcactgcacaccttccgtggcgcggcgtactccacgcctgacgagaagtatgagaaatacaagttcgataccattgccgataacgaaaacctgaacatctctagcaaaggtggttgggtggcgatgctgcaacagtatttcgcgacggcgtggatcccgcataacgacggtaccaacaacttctataccgctaatctgggtaacggcatcgccgctatcggctataaatctcagccggtactggttcagcctggtcagactggcgcgatgaacagcaccctgtgggttggcccggaaatccaggacaaaatggcagctgttgctccgcacctggatctgaccgttgattacggttggttgtggttcatctctcagccgctgttcaaactgctgaaatggatccatagctttgtgggtaactggggcttctccattatcatcatcacctttatcgttcgtggcatcatgtacccgctgaccaaagcgcagtacacctccatggcgaagatgcgtatgttgcagccgaagattcaggcaatgcgtgagcgtctgggcgatgacaaacagcgtatcagccaggaaatgatggcgctgtacaaagctgagaaggttaacccgctgggcggctgcttcccgctgctgatccagatgccaatcttcctggcgttgtactacatgctgatgggttccgttgaactgcgtcaggcaccgtttgcactgtggatccacgacctgagcgcacaggacccgtactacatcctgccgatcctgatgggcgtaacgatgttcttcattcagaagatgagcccgaccacagtgaccgacccgatgcagcagaagatcatgacctttatgccggtcatcttcaccgtgttcttcctgtggttcccgagtggtctggtgctgtactatatcgtcagcaacctggtaaccattattcagcagcagctgatttaccgtggtctggaaaaacgtggcctgcatagccgcgagaagaaaaaatcctgattcggtgagttttcgctaaaataagggcggtcagttgaccgccttttttcttttcgtagggcggataagcaccgcgcatccgccacacaaagcaacaggaacatcatgagcgataatgacactatcgtagcccaggccacgcctccgggacgtggcggcgttggcatcctgcgcatctccggcttcaaagcccgtgaagttgccgaaaccgtgctgggtaaactgcctaagccgcgctacgccgattatcttccgtttaaagacgccgacggcagcgtgctcgatcaggggattgcgctatggttccctggcccgaacagcttcaccggcgaagatgtgctggaactgcaaggtcatggcggtccggtgatcctcgacctgctgttaaaacgcattctgaccattcccggcctgcggattgctcgccctggtgagttttccgaacgcgcgtttcttaacgataaacttgacttagcccaggccgaggcgattgccgatcttatcgacgccagtagcgaacaggcggcccgtagcgcacttaacagcctgcaaggcgcattctccgcacgggttaatcatctggtagaagccctcacccacttgcgcatttacgtcgaagcggcaattgatttccccgatgaagagatcgatttcctctccgacggaaaaattgaagcccagctcaatgacgttattgccgatcttgatgcagtgcgtgctgaagcacgtcagggtagtttgttgcgcgaagggatgaaagtggtgattgccggacgtcctaacgccggtaaaagcagcctgttaaacgcgctggcggggcgtgaagcggcaatcgtaaccgatatcgccggaactacgcgtgacgtgctgcgtgagcatatccacattgacggaatgccgctgcatatcatcgataccgccgggctacgtgaagccagtgacgaagtagaacgtattggtatcgagcgcgcgtggcaggaaattgaacaggccgaccgcgtgctgtttatggtcgatggcaccacaacagacgccgtggatccggcagagatctggccggaatttattgcccgtctgccagcgaaactgccgatcaccgtggtgcgcaataaagccgatatcaccggcgaaacgctgggaatgagtgaagtgaacggtcacgcgttaattcgtctcagcgcaaggactggtgaaggcgtggacgtgctgcgtaaccatctcaaacagagcatgggctttgacaccaacatggaaggcggcttcctggcgcgtcgtcgccacctacaggcgctggaacaggcagcggaacatctacaacagggcaaagcgcaactgttgggagcctgggcaggtgaactgctggcggaagagttgcgtctggcacagcagaacttaagcgaaatcaccggggaatttactagtgacgacctgctggggcggattttctccagcttctgtattggtaagtaaccgcgcttacgaggccgcattctgactgtcagatgcggcttcgcttcattgttaccactcctgttattcctcaaccctttttttaaacattaaaattcttacgtaatttataatctttaaaaaaagcatttaatattgctccccgaacgattgtgattcgattcacatttaaacaatttcagaatagacaaaaactctgagtgtaataatgtagcctcgtgtcttgcgaggataagtgcattatgaatatcttacatatatgtgtgaccagtaaatggttcaatattgacaacaaaattgtcgatcaccgcccttgatttgcccttctgtagccatcaccagagccaaaccgattagattcaatgtgatctatttgtttgctatatcttaattttgccttttgcaaaggtcatctctcgtttatttacttgttttagtaaatgatggtgcttgcatatatatctggcgaattaatcggtatagcagatgtaatattcacagggatcactgtaattaaaataaatgaaggattatgtaatggaaaactttaaacatctccctgaaccgttccgcattcgtgttattgagccagtaaaacgtaccactcgcgcttatcgtgaagaggcaattattaaatccggtatgaacccgttcctgctggatagcgaagatgtttttatcgatttactgaccgacagcggcaccggggcggtgacgcagagcatgcaggctgcgatgatgcgcggcgacgaagcctacagcggcagtcgtagctactatgcgttagccgagagtgtgaaaaatatctttggttatcaatacaccattccgactcaccagggccgtggcgcagagcaaatctatattccggtactgattaaaaaacgcgagcaggaaaaaggcctggatcgcagcaaaatggtggcgttctctaactatttctttgataccacgcagggccatagccagatcaacggctgtaccgtgcgtaacgtctatatcaaagaagccttcgatacgggcgtgcgttacgactttaaaggcaactttgaccttgagggattagaacgcggtattgaagaagttggtccgaataacgtgccgtatatcgttgcaaccatcaccagtaactctgcaggtggtcagccggttagtctggcaaacttaaaagcgatgtacagcatcgcgaagaaatacgatattccggtggtaatggactccgcgcgctttgctgaaaacgcctatttcatcaagcagcgtgaagcagaatacaaagactggaccatcgagcagatcacccgcgaaacctacaaatatgccgatatgctggcgatgtccgccaagaaagatgcgatggtgccgatgggcggcctgctgtgcatgaaagacgacagcttctttgatgtgtacaccgagtgcagaaccctttgcgtggtgcaggaaggcttcccgacatatggcggcctggaaggcggcgcgatggagcgtctggcggtaggtctgtatgacggcatgaatctcgactggctggcttatcgtatcgcgcaggtacagtatctggtcgatggtctggaagagattggcgttgtctgccagcaggcgggcggtcacgcggcattcgttgatgccggtaaactgttgccgcatatcccggcagaccagttcccggcacaggcgctggcctgcgagctgtataaagtcgccggtatccgtgcggtagaaattggctctttcctgttaggccgcgatccgaaaaccggtaaacaactgccatgcccggctgaactgctgcgtttaaccattccgcgcgcaacatatactcaaacacatatggacttcattattgaagcctttaaacatgtgaaagagaacgcggcgaatattaaaggattaacctttacgtacgaaccgaaagtattgcgtcacttcaccgcaaaacttaaagaagtttaattaatactacagagtggctataaggatgttagccactctcttaccctacatcctcaataacaaaaatagccttcctctaaaggtggcatcatgactgatcaagctgaaaaaaagcactctgcattttggggtgttatggttatagcaggtacagtaattggtggaggtatgtttgctttacctgttgatcttgccggtgcctggtttttctggggtgcctttatccttatcattgcctggtttagtatgcttcattccgggttattgttattagaagcaaatttaaattatcccgtcggctccagttttaacaccatcaccaaagatttaatcggtaacacctggaacattatcagcggtattaccgttgccttcgttctctatatcctcacttatgcctatatctctgctaatggtgcgatcattagtgaaacgataagtatgaatttgggttatcacgctaatccacgtattgtcgggatctgcacagccattttcgttgccagcgtattgtggttaagtagcttagccgccagtcgtattaccagtttgttcctcgggctgaagattatctcctttgtgatcgtgtttggttcttttttcttccaggtcgattactccattctgcgcgacgccaccagctccactgcgggaacgtcttacttcccgtatatctttatggctttgccggtgtgtctggcgagttttggtttccacggcaatattcccagcctgattatttgctatggaaaacgcaaagataagttaatcaaaagcgtggtatttggtagcctgctggcgctggtgatttatctcttctggctctattgcaccatggggaatattccgcgagaaagctttaaggcgattatctccagtggcggcaacgttgatagcctggtgaaaagcttcctcggcaccaaacagcacggcattatcgagttttgcctgctggtgttctctaacttagctgttgccagtagcttctttggtgtcacgctggggttgttcgattatctggcggacctgtttaagattgataactcccacggcgggcgtttcaaaaccgtgctgttaaccttcctgccacctgcgttgttgtatctgatcttcccgaacggctttatttacgggatcggcggtgccgggctgtgcgccaccatctgggcggtcattattcccgcagtgcttgcaatcaaagctcgcaagaagtttcccaatcagatgttcacggtctggggcggcaatcttattccggcgattgtcattctctttggtataaccgtgattttgtgctggttcggcaacgtctttaacgtgttacctaaatttggctaaatccttcaagaagccagccattcgctggcttcttgcctctcaggaaatcacttatgtccaaatggcaactcgcctgatcctccttcaccacgtatgctttgcgtcaccttactatcaggacgctttagcccatgtcccgctttttgatttgtagttttgccctggttttactttatcccgccgggattgatatgtacctcgttggtttaccgcgcatcgccgccgatctcaatgccagcgaagcgcagttgcatattgcgttctccgtatatctggcggggatggcagctgcgatgttatttgccggtaaagtggccgatcgtagtgggagaaagccggtcgccatacccggcgcggcgctatttattattgccagcgtgttctgtagtctggctgaaaccagcacgttatttcttgcaggccgatttctacaggggttgggcgcaggctgttgttacgtagtggcgttcgctattttgcgcgacacgctggatgatcgacgtcgggctaaagtgctgagtttactcaacggtattacctgcatcattccggtgttagcgccagtgctcggacatctgattatgcttaaattcccgtggcagagtctgttctgggcgatggcaatgatgggcatcgcggtactgatgttgtctttgtttattttaaaagaaacgcgcccagcggcccccgcagctagcgataaaccacgagaaaatagcgagagcctgcttaaccgttttttcctcagccgtgttgttatcaccaccctcagcgttagcgtgatcctcactttcgtcaacacgagtccggtattgctgatggaaatcatggggtttgagcgcggtgaatacgccaccattatggcgctgaccgctggcgtcagcatgaccgttagtttctccacgccatttgcgctgggaatttttaagccacgtacgttgatgatcaccagccaggtgttattcctggcggcggggatcactcttgccgttagtccttcccatgcggtttctctgtttggtatcacgctgatttgcgccggtttcagcgtaggttttggtgtggcgatgagtcaggcgttagggccgtttagtttacgcgcgggcgtagccagcagcaccttaggtattgcgcaggtttgcggtagcagtctgtggatttggctggcagcggtggttggtatcggcgcatggaatatgctgatcgggattctgattgcctgtagcatagtgagcctgttgctgattatgttcgtcgcgcctggacgccccgttgccgctcatgaagaaatccatcaccacgcttgatctcaatctgctgctttgtctgcaactgctgatgcaggagcgcagcgtaaccaaagcggcgaagcggataaacgtgacacctagcgcggtgagtaagagcctggcaaagttaagagcgtggtttgacgacccgctctttgtgaacagtccgctgggtctgagccccacaccgctgatggtcagcatggagcaaaatctggcggagtggatgcaaatgagcaacctgctgctggataaaccgcaccaccagacaccgcgcggcctgaagtttgagctggcggcggaaagtccgctgatgatgatcatgcttaatgcgctgagcaaacagatctaccaacgttacccgcaggcgaccatcaaattacgtaactgggattacgattccttagatgccattactcgtggtgaagtggatatcggtttttccggtcgcgaaagccatcctcgcagccgggagctgttaagcagcctaccgttagccattgattatgaagtgctgtttagtgatgtgccctgcgtctggttacgcaaagatcatccggcactgcatcaaacgtggaatctggacaccttcttacgttatccgcatatcagcatttgctgggaacagagcgatacctgggcgctggacaatgtgttacaggagctgggacgcgaacgcacgattgctatgagcctgccggaattcgagcagagtctgtttatggcagcgcaacccgacaatctgctactggcgaccgcgccgcgctactgtcagtactacaatcaactccatcaactgccgttggttgctcttcctctcccgtttgacgaaagccagcaaaaaaagctggaagttccttttaccctgctgtggcataaacggaacagccataatccgaagatcgtctggttacgggaaaccattaaaaacctttacgcgagcatggcataaccgaatcgtatgaaacgcgacccaatttcacaataaaatgtaaaaaagttgtaataagcttgtctgaatcgaacttttagccgctttagtctgtccatcattccagtaaatgattactcttgtattcataatggaccattaagcatggagcgaaaaatggcgactcactttgcccgagggattttaacggaaggacatctgatttctgttcgtctcccctcccagtgtcatcaagaagcccgaaacattccccctcatcgtcaaagccgttttctggcgtccagaggtttactcgcagaactgatgttcatgctgtatggcattggcgaattgccggaaatcgtcaccctgccgaaaggtaaaccggttttcagtgataaaaatttgcctagcttttccatttcctatgccgggaatatggttggcgtggcgttaacaaccgaaggtgaatgtggcctcgatatggaactacagcgtgcgacgcgcgggtttcatagcccacacgcgcccgataaccacaccttttccagcaatgaaagcctatggatcagtaaacaaaacgatcctaacgaagcgcgggcgcagctcatcacgctgcgccgaagcgtgctaaaactaaccggtgatgttttgaatgacgatccgcgcgatctgcagctgctgcccattgccggacgcctgaaatgtgctcatgtaaatcatgtagaagcgttatgcgacgcggaagacgtgctggtgtggtccgtggcggtcacgcccacgattgaaaagctcagtgtctgggagttagatggcaaacacggctggaaaagcctgccggatattcacagccgcgccaacaatcctaccagccggatgatgcgttttgcccaactctctaccgtgaaggcttttagcccaaattgatagacaaccacaggagtcatcatgtctgaaaaattgcaggtggttacgttactggggagcctgcgcaaaggcagttttaatggcatggttgcacgtaccctgccgaaaattgctccggcgagcatggaagtcaatgcgttaccatccattgccgacattcccttgtatgacgctgacgtacagcaggaagaaggttttccagcaacggttgaagctctggcggaacagatccgtcaggctgacggtgtggtgatcgtcacgccggaatataactacagcgtaccgggtgggctgaaaaatgccatcgactggctttcccgcctgccggatcaaccgctggccggtaaaccggtattgattcagaccagcagtatgggcgtgattggcggcgcgcgctgtcagtatcacctgcgccagattctggttttcctcgatgcaatggtgatgaacaagccggaatttatgggcggcgtgattcagaacaaagttgatccgcaaaccggagaagtgattgatcagggtacgctggaccacctgaccgggcaattgaccgcatttggtgagtttattcagcgagttaagatctaaataaaaaacccgccagcaatcatgcatggcgggtttttaacgcgctatcgattttagtgagcgtcgataaagacaatcttcaggataaacagcagcgcaacgatgattacgcacgggcttagatcacgcagacgtccggtaccgattttcatcacgcagtaggagataaagcccagcgcgataccttcggtaatgctgaagctgaacggcatcatcacggcggtaataaacgccggaacagattcagtaagatcctgccagttcacgcgtgccagactggaagtcatcagcacgccaacgtaaatcagcgcaccagctgcagcgtagcctggcaccatccccgccagcgggctcagaaagataaccagcaggaacagcagaccaacaaccactgccgtcagaccggtacgaccgccaacgcttacgccggaagaggactcaatataagccgtaacggaagaagtaccgataaagctaccggtcacggaagagatactgtcgacatacagcgcctgcttcatgcgcgggaatttccccttctcatccgccagacctgctttatcggtcacgccaatcagcgtaccggaggagtcaaacaagttgaccaacatgaaagagaaaatcacccctgccagcccgaggttaaagctcccggctaaatctacatgacccacaactgtcattacgctcggcggcgcagaaacgatgccattgtagtgcacatcacccagcatccagcccagcagcgtcgtcaccacgatagaaaccagcaccgctgcgtgaatgttgcggctggccagaatagcaatgatgaagaagccgaggatacccagaagtacgctgtgagaagtcagattaccgatgctcaccagcgtttccgggttagcgacaatcacacctgcgtttttcagccccatcatgccaatgaacagaccgataccgctggtaatacccacacgcagactcaccggaatgttggctatcatccagtagcgaacgcggaaaatcgtcagtaacagcagacctatcgcgccccagaagattgcgcccatcccgacctgccacggcaagcccatcgcctgtacaacgacaaaagcgaagaacgcattcaggcccatagcgggtgccagtgcaactggcaggttagcaaacagtcccatcataatactgccgaatgcagcgatcagacaggtagtgacgaagacggcgctggtatccatgccagcaacgccaagaatttgcgggttaacaaaaacgatgtaaaccatcgtcaggaaggtggtaaaaccggcgatcacttcggtccgtgccgtcgtgccatgttcgcgcagtttaaacacgcgttccagcatcccctgaccagaagtctgggtggtatgttgatgactcattatctatttccgaacaaggagggaaaatccgtcgctatcgtataccaaaatgcgacaataggcgcgtttgtgagagacttttttattggatttacttatacggcaacgattgcgttgcgcaaatcggctctacgaaaacgttaaactgattaaaaaggaaaggcatgtcccggatagaagcggtatttttcgactgcgacggtacgctggtcgacagtgaagtcatttgctctcgcgcatatgtaacgatgtttcaggaatttggtattacgctcgatcctgaagaggtattcaaacgtttcaaaggtgtaaaactgtacgaaattatcgatattgtttcccttgaacatggtgttacgttagcgaaaacagaagctgaacacgtttaccgtgcagaagtcgctcggctgttcgatagtgaactggaagccatcgaaggggctggagcgctcctgagtgcgatcactgcgccaatgtgtgtggtatctaacggcccaaataacaaaatgcagcattctatgggcaagctgaatatgttgcactacttcccggataaactgttcagcggctacgatattcagcgctggaagccagacccggcgttaatgttccatgcggcaaaagcgatgaatgtaaatgtagaaaactgcattctggttgatgacagtgttgccggtgcacaatctggtatcgacgcaggtatggaagtgttctacttctgcgccgacccgcacaataagccgatcgttcacccgaaagtcaccacctttacccatcttagccagttacctgaactgtggaaagcgcgtggttgggatattacggcataattcttcacactcccttcacttaccccgcttaaattggcgctcaaaggtaagtaaagggagtttgatatgtctgttagtcgtcgggtaatacatcacggactttattttgcagttttaggaccgttaattggtgttctgtttcttgtcctctacatattcttcgcaaaagaaccgctggttctttgggtgataatacatccaatttttctcttattgagcataactacgggagctattcctgcgttgttaaccggtgtaatggttgcctgtctgccggaaaagatcgggagtcagaaacgttatcgttgtctggctggtggcataggtggcgtcgttatcaccgagatctattgtgcagttattgtacatattaagggcatggcttccagcgagttgtttgaaaacattctttctggtgacagtctcgttgtccgcatcattcctgcattgctggcaggtgtggtgatgagcagaatcattacccgtctacccggattggatattagttgtcctgaaacagactctttaagttaagcgggatactttatctttgggctactcaaaagcagacaggatgtttctatgactcaaaatatcaggccgttaccccaattcaaatatcatcccaagccactggaaacaggcgcatttgaacaggataaaaccgtagagtgcgattgctgtgaacaacagacgagtgtttattacagcggtcccttttattgcgttgatgaagttgaacatctctgtccgtggtgtattgcggacggttctgctgctgaaaagtttgcaggtagttttcaggatgatgccagcatagaaggtgttgaatttgagtatgatgaagaggacgaatttgccggtattaagaacacatatcctgatgaaatgctgaaagagttggttgaacgcacgccaggttatcatggatggcagcaggaattctggctcgcgcattgtggcgatttctgtgtttttatcggctatgtgggctggaatgatataaaagatcgcctcgatgaatttgccaaccttgaagaagattgtgagaatttcggtattagaaattctgatctagctaaatgcctgcaaaagggtggtcattgtcagggttatctcttccgctgtctccactgcggcaagctgagactgtggggtgattttagctaattatttaaataatgagaacaggccggagcgtaattcacacatccggccttatttcttaagcttaaccgagtgctaattctgcggcagcggctttatcagcgattaccatcaggctaggatgcagctgcaacacggaagctggaacatcttcggtaaccggaccttgcagaacatttttcagtgcctgcgctttacccgcgccgctgacaattatcagcaagtttttcgccgccatgatgcttttcggccccatcgtcacgtagctgtcaggcactaagctaaagtcgccgcccaactcgccatgcgccacaatatcaaccatctctccctggatcgggaactccacggtttgctcatggaaatgggtcgtattcggcaaattgccacaaaaatgaccatctgcacctaatcccagcaccaccaaatccagtccgccttcacgcgccagtttctgatcatgctcgcggtagttatcaatagtgagcttctggatattctcttctttgatccccgcaggggtgaaaaacagattacgcagattggtaatcgttacgccttctccctctttgccgcgaaatggaatttcatcaaaattatagaaatagcagttatcgtaccagggcttacctttaaccagggtggtgaggtattcatacatgcctttgggcgtgctaccggcggtaattgccaggttaacacgacgcgtcttgctcatataaccaagcagatggtgtgccgcgacacggctcatttcctggtaatcttcggtaatgattaatttcatcttaatgccttattttatttaaataatttctgtacaaaggctgcataggctggtcgccagacatccatttcatggttcagacccggatattcctggtaatcaaagttaatttttttctgctcaagctcagttttcagcccggcgatatccttgccggttacgacatctttatcccccacaaccacagtaaaattacgtagttgctggttgatagctgccggatcgttcagtcgggccgcgacaccttcatccggtacggttgtcgtggtaacaccactgaatgtggccagccagccaaagctttccagatgattcattccggaaaccagcgcctggtacccgccttgactaagccctgccagcgcgcggccatcggcatctttacggacattaaaacgcttgctaatcagcgggataatatcgttcatcagttcgcgatctgccgctttagcattcagcggataaaagactttacgtctttcctgaggcacgaaatcttcgggaataatgcccttcgcatcggtttctgtatccgggatcaccaccagcatcggtttaattttcccttcagcaagcaggttatccatgatttgcgggatacgcccctgatcgatagcggaacgtccggtatcaccaaagccgtgatagaaatagagcactggcaaaggctcgcccatgccggtgtatcctggcggggtccagacatacatctgacgttcagattgcaatgcgttggagtggtaagttatggcgatcaaatcaccatgcgcaacagaacgcgtatccagataactgcctggcaccagaatcatactggagttaacctggcgctgaggattagtcattgcggtgcctgtatcaatgctgcgtacaccatcaacattgaaaaaatactcgtacaggttgcctttcaggataggtgtgcgccagctccagactcctgcttcgtctttggtcatcgggtgaatattgtccggaaccggaacacccaccactacagagacattttttgccccaggggcaaagtagcgaaaggtcacgctgttatcggcattgacctgagtcacatactgtttcaccgggatagtgggtgccgggctggctggcatatccgctgctatggcccactgagcagaaataccgctggcaatagccagcgttaaagcagcaatttttatattcatcgtaatattcctttcattaagttccattaccaccagatttcagcctgggcaccgacagcaaactggtcgtctttattgtcttcaaaggtgaagccatccagttcgttttccagggctttgatatacgtggcgtagaaacgaatttccggacggctggtcaacatactggtattgactttaaaggtatggaagagcgtggttttataaccagactcattaaatttattactattcgcatctttgttttgctgggtgaaatagcccagttcaacacctgtctggttatattggtcccaaatataggccgggcgaacaaccgcacgaatagattcgaaatcagagtgggcgcctgtttcgtagctatatatatcgttaccgaaggagtaaacaatcgcgttagctacaatgaaatgatcgccaatataggcttcgccctggctagtcagacgtaccgctgttccgccggtgtgatcaccataataacgaccattaaaggtggtaaatggacttgcgccagcataacggccaaagttactggcgatagagttattcgcgaccaggaaggagaattcgttgaagccacctttatcaaatttctgcgttaaagatgtgccaaacatccaggtatctttccagtcataatacccgttattatcctgattatctttttcgcttgcgctttcgtttgccgtgacataacgaccacttaccattaaggtggctttatcccataacgggatatctttatagcgtaaatcaatggtattggtattaatctgctgtttgttttgcaggctgcgatcgtaatcatcgacatcttcgcgaaccagcgcgatatcaattttacccggaccgactttccagttttccagacctacacccgctgcggcatcagtacgctgcgttttccagtcaagcatctggatttcaattttcggcgcaccgtgtttacccacccagaaatcagcctctggcgcaaagggcaggaaacctttggtggtaacgtacatatcggagaactgcatatagttctcgccaccggcgttatcgccaaaccagccggtagagtactgctgaccaacgttaccatccatcatcacaacggcatcaacccgtttgccgttttcgttgtagacacgttgttttaactgcaaatcaaaccagccggagtattcgttaccaaagcggcccagagaaccaatcgcccaacttttaggactaccatgagaggcggtcccccaaccagaacggtaatagccgttgtaactaaagccaatttcatctttcacaaatttactgaaatctttcagagtcatggaagaataaatgctgcctgtctcactggcatttttctcttcatttttgaccagtacagcatcaggttttgcggcactactggtcgggaacggattggcggcatacccttgatcattcgtacttacgctacgattcaccgtcgctggcgtatactttttcttctcttcatctttatactttttgagttcgctttgcgtttctcttaacgccttttctaataactcaaggcgttgttccaccgttaaactttcagccaaactttgtgcagaaaaggctaacggtgccattaataagatggcagaggtaataagatttcgtctaaacataatatccctttatggtgcaaagaaagaattaacgcatcgcatccagactgttctgaatgcgacgataattaaggtgctttaatggttattttttttaaactcagcccccgcgtcttgatcacctctgcataccatccgaagcttttcttgcgtgttcttgtgaggcttccttcgccattatcatcacgatccacataaataaagccgtagcgcttagacatttgactatgagatgcactgactaaatcaattggcccccaactggtgtaccccataatatccacaccatcggcaatcgcttcatttacctgtaccaggtgatcgtttaaataggcaattcgataatcgtcctgtatgctaccatccgcttcaacgctgtcttttgcgcctaatccgttctcgacaataaataacggtttttgataacgatcccaaagcgtatttaacagaacccgtaatccaaccggatcaatttgccacccccactcactacttttcagatgcggattggggatcatattcagtatgttgccctgcgcatttttattaatgctttcgtcgtgggaaacacaaccagtcatgtaataactaaaagagatgaaatcgacggtatgttttaaatcttctgcgtcactttcagtcatctcaatggtgatattgtggtcgcggaagaaacgctgcatatagccgggatactggccacgcgcctgaacatcaccaaagaacatccagcgccggttctcttccatggcctgcaacatatcctgtggctggcaggtgagggggtaaaccagcccaccgagaagcatattgccgattttcgcttcggggagcaggctatgacaggctttaactgcccgcgcactggcaaccagttgatggtggatagcctgataaacttccgcctcgccactctcttctgccagccccacgcccgtgaatggcgcgtgtaagctcatgttgatttcattaaacgtcagccataacgccactttatgttggtagcgagtaaagaccgtgcgggcgtaatgctcgaagtgatcgatgaccgctcgattagcccaaccgccgtagtttttcaccagcccatatggcatttcgtaatgggataacgttaccagcggcttgatccccgcctgcgccatttcatcaaacagccgatcgtaaaacgctaaccccgcttcattcggttcgacttcgtcgccctgagggaaaattcgcgcccaggcaatggaaatacgcagacaggtgaagcccatctcggcaaataacgcgatatcttccgggtaacggtgataaaaatcgatggcgacatctttgatattctctttccccaggatgcgcggttccatttttcccattacgccatgaggctgtaaatcactggtgctgatccctttgccatcttcctgccaggcaccttccacctgattggcagctgttgcgccaccccaaagaaatgtttctggaaatgctttcataattaactccttttatcgttagcgaatgatggataacagcggttcacctgcgcttatctgcgccgtgccgtggggtaatacgtccgtaaaatcatcgctattactgattaataccggcgtcgtcagatcaaatccggcctcgcgaatagcagggatatcaaaagaaatcagccgatcgcctgtattgaccttgtcacccacgttgacgtgagcggaaaagaatttgccgtccagttttacggtgtcgataccgacatgaatcaggatctccacaccatcatcactctcaatgccaatggcgtgtaatgtggcgaacaagctagcaattcgacccgcaaccggagaacgcacttcaccaacgctgggcagaatggcaatacctttacccaacaggccactggcaaacgtggtatcagcgacgtgaatgagcggcacaatctctcccgtcatcggactacagataccgccctgctcaggtggtgtaataacctctggtgttttctcttgcggggcaccctgcgctggctgacgtttagcggtgatgaaatgaagcatcaccgtaccgacaaatgcgcaaccgatggcaatgacaccgccaataacgctggcccagacggtgaaatcaattcccgtactcgggatggtttgcatgaaggtgaaaatacttggcaaaccaaaggagtagactttcgtttgcgcgtagccaataatggtggcccccaaagccccactgatacaggcgataacaaaggggtacttacgcggcaggttgacgccatataccgctggttcggtgataccaaacagactcgtcaacgccgcacttcccgccaccacttttttctgcgcatcgcgttcgcagaggaagacgccgagcgccgccccgacctgcgccataatggcgggcattaacagcgggatcatggtgtcgtagcccagcacggtgaagttattgatacacagcggcaccaggccccagtgcagtccgaacatgacgaagatttgccagaagccgcccattaccgcgcccgcaaatgcaggaaccgcctgataaagccagagataaccggcggcaatcagttcgcttatccaggtacttagcggccccaccagcagaaaggtgacgggtgtgataaccatcagacatagcaatggtgtgaagaaatttttgattgcgctcggtaaccacgcattaagtcggcgttccagaatgctgcacaaccaggcagaaaaaataatgggaataacgctactgctgtaattcaacaatgtgaccggaatacccaggaaatccagccccagcgcatccgctttttgcccgttctcgaaagcagtcagaattaatggatgcactaacgctccaccaatcaccatggcagtaaatggattaccgccgaagcgtttccccgcggtgtatcccaggattatcgggaagaaccaaaacaaggcatcactggcgctgaataaaattaaataagtaccactttgttcggtcgtccactgaaaagtgagcgccagagccagcatacctttcaagatcccggttgccgccatcaaaccgatcagaggcgtaaaaataccactaataacataaacaaagcggtttagcagattacctttatcatcattttccggtgcctgttgcgctttttcgtcaaggcctgccacactgttaaccgccaggaagacatcggccacatggttacctatgaccacctgaaactggccaccgctttccaccaccataataataccgggggtctttttcagtacctctgcttgcgctttgctttcatcctttaatttaaaacgtaatcgcgttgcgcaatgcatcagactcacaatgttatctgcgcccccgactcctgcgactatttttctggctaactccgtcataacttgccctctaccgctttgcggcaaaactccaaaaaaaaacctgaaaaaaacggcctgacgtgaatcaagcaatttttttcaggttttgcccgcttagtgcggtaacaatcctttactcagtaataatatttcagtgttctttgcgcacgcgctctatatttatggctaaaaacataatctctgcgggactaattttacgttgatactgcaaaccaataaaaatggcgatccgttccgcacattgccatgcttgcgggtaattttgttttactgcttgttgtaaactttcatcactatcgttaatactagcatgttcaagaatacgccaggataaaaacttcagatgtgtaaccagtcgctgataactcaagctttcttcctggtaattaaggctgaactgaaattttattaattgcagcatttcgcgcattaactgcgtgacacctgcaacatcctccatatttccgctcatttgggcactgaccagatgcatggcaataaagcccacttcatctttcggtaactgcacgcccaaccgtttatcaataatggttaacgcttcttcccctagctggaactctttcgggtaaagccgctggatatcccacagcaacgggttgggcagcaacacgttttgctgaaagcgtttaatcgcaaactggcaatggtcagttaggctgatataaatactgtcctgtaattttcccaagcgctcctgcgctaaagagataatacgatcacaggttgccatcacctcaagaggaatatgacttaagagttcgcttaatcgcccgttcagttcatgactgctcaaggcatactctttttctattccactactgttaattctttcgccagcgcgtttttgaaagccaattccgcgccccatgacgactttttcccgctgttgatcatcaataaccaccacaacattattgttgagaattttggtgatttgcatgttcatagcaaggaccttttttataaacaaaaaaacccgacttcaccagtattctctggttatgtcaggttttgcctgcgaatgcagtaacaatccagtcatttattaatggtttttataacgaacatccaggttcggaaattaatttaattgcgtgcagagaaaatagcaatgcgctattgataaaaatatgaccatgctcgcagttattaactttgtgtaattttaggaatttataaagttatatataacaaatcccaataattaagttattgggatttgtctggtgaattatttgtcgctatctttccccgccagcagtttatccagctcatcgccaccgacgtgacggaaatcctgccccttcacgtagtagaagataaactcacaaatattctggcagcggtcgccaatacgttcgatagaacgcgcgcagaacagcgcagtaagtacgctcggaatggtacggctatcttccatcatgtaggtcatcagttgacgaacaataccttcgtattcctgatcgacttttttatcttcacgataaatacgtaccgcttcgtcaatgtccatccgcgcgaacgcgtccagcacgtcgtgcagcatctggatggtatgacggcccaggctctccagacttaccagcaacggctgatgctgctgggagaatttctccagcgcagtacggcagattttgtccgccacgtcgccaatacgctccagctcggcaatggttttactgatcaccataaccagtcgcaggtcgctcgccgtcggctgacgtttggcgataatgcgcacgcaggcttcatcgatcgccacttccatcatgttgacgttcttgtcgccttcgatgacgcgcttcgccagatcgctgtcctggttatgcatcgcggtgattgcatcagaaagctgctgctccaccatgccgcccatggtcatcacctgcgtgcggatactttccagttcggcgttgaactggccggaaatatgtttattaagattgagactgtccataacgcactcctgaatcaaccgtaacgaccggtgatgtagtcttctgtttgtttcttcgctggcttggtgaacagatcgtccgtgttgctgaactcaatcaattcgcccaggtacataaacgccgtgtggtcggaacaacgcgcagcctgctgcatgttgtgggtgacgatcaccacggtgtaatcctgcttcagttcggtgatcagctcttcaatacgcccggtagagatagggtcgagcgcgctacacggttcgtcgagcagcagcacttccgggcgaatggcgataccacgcgcaatacacagacgctgttgctgaccaccagagagagagtaaccgctctggtgcaatttatctttggtttcgttccacaatgcggctttggtcaatgcccactgcacgcgctcgtccatgtcggcacgggagagcttctcaaacagacgaacgccaaaagcgatgttgtcgtagatggacatcggaaacggcgtcggtttctggaacaccatgcccactttcgcacgcagcagtgcgatatcctgagagttggtcaggatgttgtcgccatcaagcagaatttcaccttccgcacgctgctccgggtacagttcaaacattttgttgaaggtacgcagcagcgtgcttttaccgcagccggacggcccgataaacgccgttacctggtttttagcgatatccaggttgatgtttttcagggcatggaatttgccgtagtagaagttcaaattacgaacctgaattttactcggggcagtttcaaccatactcattgcaatcttttcctcatcgtgcctgatgcacttcgctaatcaggcttaccgtaggccggatcaggcgttcacgccgcatccggcaaagtgttaaccgtgtacagagtcaaaaaggcgctcggtcggtcccctcgcccctctggggagagggttagggtgaggggaaaaccgtgtcagcaatatcaaccgtgtttattcttcgcaaaaacaacgcgcgccagaatgttcagcagcagtacgcacagggtaatgatcaataccccggcccaggccaattgctgccattccgcaaacgggctcatcgcaaacttaaagatcgtcaccggcaggttggcgatcggctgcatcatgtccgtgctccagaactggttggagagcgcggtaaacagcagcggcgcggtttcaccagcaatacgggcaatcgccagcaggataccggtcataatcccggacacgctcgctttcagcgtaatcgcagagatcatcttccacttcggtgtacccagcgcataagccgcttcacgcaggctgtacggcaccagtttcagcatgttctcggtggtgcggataacaatcggcacctgcaacaacgccagggcaatcacgcccgcccagccggagaagtgctccatctgcgccaccacaatggtgtaaacaaacagaccaaccacaatgctcggcgcagagagcagaatgtcgttaatgaagcgaatcacttctgccagccaggatttacgaccatattccgccagataaatccccgccataatgcccagcggcgtaccgaataccgtggcccacaaaattaacagcccgctacccgccagagcgttcgccagaccaccaccttccgtattgggcggcggcgtcatttcagtgaacagcgccaggctcataccgtcgataccgcgagtgatggtggacattaaaatccagatcagccagaacaggccgaaggccatcgtcgccatgctgagcgtcagcgcaatacggtttttgaggcggcgacgcgcctgcattttgcggcgagattcagccagcgccgcagtggtttgcatttcaaccatagccattagcgtgccccctcattcttagccaggcgcataatcataaacttgcttgcggcgaggacgatgaaggtaatcacaaacaggatcaggcccagttccatcagtgcggcaacgtgcagaccggattccgcttccgcaaattcgttcgccagcgcagaggtgatactgttgcccggcatatacaggctggcgctgtcgagctggtaggtgttaccgatgataaaggtcaccgccatggtttcaccgagcgcgcggcccagccccagcatgatgccgccgataacaccatttttggtgaacggaagaacgatacgccagataacttcccaggtggtgcagccaataccgtaggcgctctctttcatcatcaccggggtttgttcgaacacatcacgcattaccgccgcaatgtacggaataatcatgatggcgaggatcacgcctgccgcgaggataccgataccaaatgcggggccagagaacagcgcgccaacaatcgggatattgctcatgatattgccgaccggctcctgaaagtaaacggcgaacagcggcgcaaagataaacaggccccacatgccgtaaacgatacttggaatggctgccagcagctcaatggcgatacccagcgggcgtttcagccagccaggcgcaagctcagtcaggaacagggcgataccgaaactcaccgggacggcgatcagcagcgcgataaagctagtcaccaacgtaccgtagatcggcaccagcgccccgtagatatcgttcggtgcatcccactctttggtccataggaaagccagaccaaatttctgaatgctcggccaggaggagatgatcagagagacaataatgccacccaacatcaatagcacaatcagcgccgccagttttaccagcacgctgaaaattatgtcgccctttttacccggtgggttaaaagcaggcttggttgcagccataagttactcttcagttaaacgcgtttacaaagtcattttgtaatgccggatgcggcgtaaaacaccgtacccggcctggagttttattagtacagcggcttaccgctactgtctttaatattggtcttccacgcagcgcgaacctgttcaactacactatccggcaggctggcgtaatccaggtcgttcgcctgtttagccccggttttgtacgcccagtcgaagaatttcagcacttctgtgccttgttctggtttcttctgatctttgtggatcagaatgaacgtggtagaggtaataggccatgcatcttcgcctttctggttggtcagatcctgagcgaaggttttgctccagtctgcaccttttgctgcattagcgaagttttcttcggtcggactaaccggtttaccatcagcggagatcagtttggtgtacgccaggttgttctgcttcgcgtaagcatattcaacataaccaattgcacccggcagacgctgaacgaacgcggcgataccgtcgttacctttaccgcccagaccgatcggccattttacggtagagccagtaccaacgttgtttttccactcttcgttcactttcgccaggtagctggtgaagacgaaggaagtcccggagccatctgcgcggcgtactacagcaatgttttgactaggcagtttcagacccggattcagtttggcgatggcttcatcatcccacttcttgattttgcccaggtagatgtcgccgagggttttaccatccagcaccagttcgccagacttcagccctggaatgttaaccgccagcaccacgccgccaatcacggtcgggaactggaacagaccttcctgagccagtttttcgtcagacagcggcgcgtcagaggcaccaaaatcaacggtattagcgataatctgttttacgccaccggaagaaccgataccctggtagttaactttattaccggtttctttctggtaagtgtcagcccatttggcatacaccggcgcagggaaggttgcacctgcacctgtcaggcttgcttctgcaaacacagagaaagcactcatgcttaaggtcgcggcgacaacagttgcgacggtggtacgcataactttcataatgtctcctgggaggattcataaagcattgtttgttggctacgagaagcaaaataggacaaacaggtgacagttatatgtaaggaatatgacagttttatgacagagagataaagtcttcagtctgatttaaataagcgttgatattcagtcaattacaaacattaataacgaagagatgacagaaaaattttcattctgtgacagagaaaaagtagccgaagatgacggtttgtcacatggagttggcaggatgtttgattaaaaacataacaggaagaaaaatgccccgcttacgcagggcatccatttattactcaaccgtaacgctttttgccaggttacgcggctggtcaacgtcggtgcctttgatcagcgcgacatggtaagccagcagctgcagcggaacggtgtagaagatcggtgcaatcacctcttccacatgcggcatctcgatgatgtgcatgttatcgctacttacaaaacccgcatcctgatcggcgaagacatacaactgaccgccacgcgcgcgaacttcttcaatgttggatttcagtttttccagcaattcgttgttcggtgcaacaacaataaccggcatatcggcatcaattagcgccagcggaccgtgtttcagttcgccagcagcgtaggcttcagcgtgaatgtaagagatctctttcaacttcaatgcgccttccagcgcgattgggtactgatcgccacggcccaggaacagcgcgtgatgtttgtcagagaaatcttctgccagcgcttcaatgcgtttgtcctgagacagcatctgctcaatacggctcggcagcgcctgcagaccatgcacgatgtcatgttcaatggaggcatccagacctttcaggcgagacagcttcgccaccagcatcaacagcacagttaactgagtggtgaatgctttagtggatgccacgccgatttctgtacccgcgttggtcattagcgccagatcggattcgcgcaccagagaagaacccggaacgttacagattgccagactaccaaggtaacccagctctttgctcagacgcaggccagccagggtatccgcggtttcgccagactgactcaaggtgatcatcaggctgttacgacgcacggcagatttgcgatagcggaattcagaggcgatttcgacgtcgcacggaatacctgctaggctttcaaaccagtagcgggaaaccataccggagttataagaagtaccacaggcgaggatctgaatatgctcaaccttgctcagcagttcgtcggcgttcggtcccagctcgcttaaatcaacctgaccgtggctgatgcgtccggtaagggtgtttttgatcgcgttcggctgttcgtagatctctttctgcatgtagtgacggtaaatgcctttatcgcccgcgtcatattgcagattggattcgatatcctgacgttttacttccgcgccagttttatcgaagatgtttacgctacggcgagtgatttccgcaatatcgccctcttcaaggaagataaagcgacgggtcaccggcaacagcgccagctggtcagaagcgataaagttttcgcccatccccaggccaatcaccagcggactaccagaacgtgccgccagcagggtatccgggtgacgggagtccatgatcactgtaccgtacgcaccacgcagctgcgggatagcacgcagaacggcctcacgcagagtcccgccttgtttcagctcccagttcaccagatgggcaatcacttcggtgtcggtttcagaaacgaaggtatagccacgcgcttttagctcttcacgcagcggttcatggttttcgatgatgccgttatgcaccaccacaatgtgttcagaaacatgcggatgcgcattcacttcactaggttcaccgtgggtcgcccagcgagtgtgagcaataccagtgccgccatgcagaggatgttcttccgctgcctgtgccagcatctggactttaccgaggcgacgcaggcgggtcatatgaccttctgcatcaacaacggccagaccggcagagtcatatccgcggtattccagacgacgtaaaccttcaagaaggatttctgctacatcacgttgcgcgatcgcgccaacaattccacacatagtttttgattccgatttatatcgttgtcggtcaacctgtatgcccgttttttcgggcgccccgagccttgtagagagtggggttatttttatagttactgcttgtgggagggagattatgttatctcctcatcccatgtgaccgggttagccggccagaatcactttttctttaccggacgacgccagccttctttctgagtctgcggcacacggctgatagctaatgcattttcgccgacattacgcgtcacagttgtacccgcagcaatggtcgcgcctttgcctactgttaccggggccaccagctgagtgtcggaaccaacaaacacatcgtcgccgataatggtcttaaatttattcgcaccatcgtagttgcaggtaatggttcccgcgccgatgttaacgttatcgccaatttccgcatcgcccaggtaagtcagatgaccagctttgctgcctttacccagacgcgcttttttcatctcaacgaagttaccgacgtgagcaccttccagcaactcagcaccaggacgcaaacgggcaaacgggccaatggtacaggccgctgccagattcgcatcttccacaacggtatacggactgatttcgcaatcatcgccaatcacgctgtttttaatcacgcaaccggtgccaattttcacgcgatgaccgagagtcacgttgccctcgatgataacgttagtatcaatttcaacatcgcgcccgtgagttagcgtaccacgcagatcaaaacgcgctggatcgcgcagcataacgcctgctaacagcagtttttcagcctgttcggactgataaacacgctccagacgggagagttgcaggcggttattcacgccttctacttcgcttaaacgttgcggatgaacggcgacgatttcacgcccttcctgatacgccagcgcaataatgtcggtgatgtagtattcgccctgagcattattgttggtcagcttcgccagccagcgtttcatatctgcgccgttggcaatcagaatgccggtgttgatctcctgaatctgacgctgctcgtcggtggcatctttgtgctcaacaatgccggtaactttgccgttttcacgggtgatacgtccataaccggtcggatcatccagtttcaccgtcagcagaccaatgccaccctgcggtttagcatcacgcagacgctggagtgtttcgacagagatcagcggcacgtcgccgtagagcattaaaatgtcttcatcatcggcaaagaaaggtgcggcctgctgcattgcatgacccgtacccagctgctctgcctgaagcacccagttaaggttgtcgtctttcagcgcctgttttagcagatcgccgccgtgaccgtacaccaggtgaacgtgcgctgcgcctaattcattcgcagcatcaatgacatgctgaaccatcgctttcccggcaagggtatgcagcactttcggaagatcggaatacatgcgcgtgcctttgcctgcggcaaggatcactacgctcatagcattattcaacatacgcgtcctgactgtaatttgagaacgaatttaaaccgcttcaccttgaaaaaactacatttttttcatcgtgaaatggacagaggataaattgttcaataacggattatccccgctgacgaaagcgccattttcgaccatcgtcacgccttttgtctgcagaaaattaaggcagtaccttaatttaagcgtcaggtggatgtttttgctcttatttcgatcaatgaataaacaggaaaacaggggggttttatatcagcaggatctatgtgaacgctattcaggacgggtcacacgcgcaaaaaaaagccagcctgtttccagactggcttttgtgcttttcaagccggtgttacatcgcttttttggtcaactcgataacgcgcagctgcgcgatcgctttggccagttccgcagacgcctgagcgtaatctacgtcgccgtgagagctgctaatgtgctcttcagccttacgtttcgcttccatggctcgcgcttcgtcgagatcctggccgcgaattgcggtgtcggccagaacggtcacgttgccaggctgcacttcaagaatgccgccagacagatagataaactcttcgtgaccgtgctgtttcacgatgcgaatcataccaggcttaatggcggtgagcagcggtgcgtggccagggtagatccccagttcaccttcgctacccgttacctggattttctcgaccagaccagagaacatttgttgctctgcgctgacgacgtccaggtggtaagtcattgccatatcaccctccgattaaggcgttaaagttttttggctttttccacagcttcttcgatggaaccgaccatgtagaacgcctgctccggcaggtgatcgtattcgccttccatgatgcctttaaagccacggatggtgtctttcagggagacgtatttacccggagaaccggtgaatacttctgccacgaagaacggctgggacaggaagcgctggatcttacgagcacgcgctaccaccagtttgtcttcttcagacagttcatccatacccaggatggcgatgatgtctttcagttcctgataacgttgcaggatggactgaacgccacgcgcggtgtcgtagtgttcctgaccaaccaccagcgggtccagctgacggctggtggagtccagcgggtcaacggccgggtagatacccagagacgcgatctgacggctcagtaccacggttgcgtcaaggtgcgcaaaggtggttgccggagacgggtcagtcaagtcatccgcaggtacgtatactgcctgtacggaggtgatagaaccagttttggtggaggtgatacgttcctgcagaacgcccatctcttccgccagggtcggctgataacctaccgcactaggcatacggcccagcagtgcggatacttccgtaccggccagggtgtaacgatagatgttgtcaacgaacagcagaacgtcacgaccttcgtcacggaatttctcagccatggtcagaccggtcagagcaacgcgcagacggtttcccggcggctcgttcatctggccatacaccagggatactttgtcgataacgttggagtcggtcatttcgtggtagaagtcgttaccctcacgagtacgttcacctacgcccgcaaacacagagtaaccggagtgctcgatcgcgatgttacgaatgagctccatcatgtttacggttttacctacacccgcaccaccgaacagaccaactttaccgcccttagcgaacggacacatcaggtcgataactttgataccggtttccagcagttcctgagagttactcagctcttcgtaggaaggtgctgcgcggtgaatcgcccaacgctcttcttcaccgatctcgcctttcatgtcgaccggttcacccagtacgttcatgatacggcccagagtcgctttacctaccgggacttcaatcgggtgttcgaggtcttttacatccagaccgcgacgcagaccgtcggaggaacccattgcgatggtacgtacgataccgccgccgagctgctgctgaacttccagcaccagacgctcattaccattttgcacctcaagagcatcgtacacgcgcggtacggcatcctgagggaattcgacgtcaactacggcgccgattacctggacaatctttccagtagccatcttaaatcctctacgaaataacctgtttaaaccgcggcggccccgctgacgatctcggtgagttcctgagtaatgctggcctgacgagctttgttgtataccaactgcagctctttaatcaggctgccgccattgtcggtcgcggctttcatcgccaccatacgggcggcctgctcgctggccaggttttcaaccacgccctgataaacctgagattcgacataacgacgcagcagggtatccagcaacgccttcggatcgggttcgtacaggtaatcccaggatttatgtttcagatcatcatcatcacttgccggtaacggcagcagctggctgatggtcggaacctgagacatggtgttaataaatttgttgctgacaatgtaaagcttgtccagacggccttcgtcgtaggcctgcaacatcacttttaccggaccgatcagttcggacagggaagggttatcccccatgccggtgacctgggcaacaacattgccgcccacggagttgaagaagctcacgcctttgctgccgatcattgcgaggtcgcattgaacgcctttgtcggtccaggtcttcatttccgccagcagttttttgaacaggttaatgttcaaaccaccgcacaaaccacggtcggtgctcaccaccaggtagcccacgcgtttaacgtcgcggtcttccaggtaagggtgcttatattccagattaccgtgtgcaaggtgaccaatcactttgcgcatggtttctgcataaggacggctggccgccatgcgatcctggcttttacgcattttggaagcggcgaccatctccatcgctttagtgatcttttgcgtgttctggacgcttgcgatcttactacgtatctcttttgcgccggccatgagcttctcctcaatgccttgcggcctgccctaaggcaagccgccagacgttaccaggattgggttgctttgaaggaatcgaggatgcctttcagcttgccttcgatttcgtcgttgtagccaccggtctggttgatctcttgcatcaacggagcgtgatcacggtcgacgtaagccagcagagcggcttcgaagctgccaattttgctcagttcaacatccgccaggtaaccacgttctgctgcgaacagaaccagagactgctgcgcaacggacatcggcgcatactgtttctgtttcagcagttcggtcactttctgaccgtggtcaagctgcttacgtgttgcatcgtcaaggtcggatgcaaactgagagaacgctgccagttcacgatactgtgccagagcggtacggataccaccggacagttttttcatgatcttggtctgtgctgcaccaccaacacgggatacggaaatacccgggttaaccgcaggacgaataccggcgttgaacaggttggtttccaggaagatctgaccatcggtaatggagattacgttggtcggaacgaacgcagaaacgtcacccgcctgagtttcgataatcggcagtgcggtcagagaaccggttttccctttcacttcacctttggtgaaggcttcaacgtattcggcgttaacacgtgcagcacgctccagcagacgagagtggaggtagaaaacgtcgcccgggaatgcttcacgtcctggcggacgacggagcagcagggagatctgacggtaagcaacagcctgtttagacaggtcatcgtaaatgatcagcgcatcttcaccgcggtcacggaagtattcgcccattgcgcaaccggcatacggtgccaggtattgcagtgcagcggattcagacgcggttgctaccacaacgatggtgttagccagtgcgccgtgctcttccagtttacgtaccacgttagaaatggtggacgctttctggccgatagcgacatagatacatttgataccggaatcgcgctggttgatgatggcatcgatagccagtgcggttttacctgtctgacggtcaccgatgatcaattcacgctgaccacgaccgattgggatcatggagtcaacggctttataaccggtctgtaccggctgatctacggactgacgttcgataacgcccggagcgattgcttctacagcagagaagccgtcgtgatccagcggacctttaccgtcgattggtgcacccagagtgttaaccacacggcccagcaggccacggccaaccggaacttccaggatacggccagtacacttaactttcatgccttcggcaaggtcagcgtacggacccataacaaccgcacctacagagtcgcgctcgaggttcagtgcgatagcgtaacggttacccggcagggagatcatttcaccctgcatacaatcggccaggccgtgaatgcggataacaccgtcacttacagaaacaatagtaccttcgttgtgagcttcactcacaacattgaactgagcaatgcgctgcttgatcagttcgctgatttcggtggaattcagttgcatgctccagtccccttaagactgcaagacgtctgcaaggcgctcaagacgaccgcgtacgctgccatcaatgaccatatcacccgctcggatgataacgcctgccattacagacttatcgattttgcaattcagcttaactttgcgactcagacgtttttccatcgcagcagaaattttcgcgagctgttgttcactcagtgcggcagcggaaatgacgtctacctcagcggtagcctcactcacggcacgcaggtgaataaactgctccagaacatccgggagcgcgttaagacgaccattttcagccataacccgaatcaggttctgaccgttttcgtccagttgctcaccacaaactgcgataaagctctcggcgagcgtttctggcgcaagcgcgccagagagaagctctgccatttgttcgtttttggttacctcggcggcaaacgccagcatgtcctgccagcgttctacactttggtgttcgacggcaaagtcaaaagctgctttggcgtaggggcgagctaccgtaataaattcagacatcagcccctccctccttacagttcagcgacaagtttatccacgatgtcgctgttagcagcttcatccacggaacgttcgatgatcttctcggcgccagcaacagccaggatagcaacttgcttacgcagctcttcacgggcacgtttacgctcggcttcaatttccgcctgcgcctgggccacgattttagtacgttcctgttctgcctcagctttcgcttcgtccagaatctggctgcggcgtttgttcgcctgctcgatgattacctgggcttccgctttcgcttttttcagctggtcggtcgcgctggcctttgcaaggtcaaggtccttatgtgctcgttctgcggaagcaaggccgtcagcaatttctttttgacgtttttcgatggctgccattaatggcggccatacgtacttcatgcagaacagaacgaacaggacaaacgcgatggcctggccgaggattgttgcgttaagattcacagcacaatgcctctatttagttaacgttctgatattgctctttaaataaaagcaacgcttattacgcgacagcgaacatcacgtacagacccagacctacagcgatcatcgggatagcatccaccagacccataacgataaagaactgagtacgcagcagaggaatcagatcaggttgacgcgctgcgccttccaggaatttacccccgaggatgccgataccgatcgcagcaccgattgccgccagacccatcatcacagcggcagccatgtacagcagatccatattcaggttttccatgacagtctccagtttgtttcagttaaaacgtagtagtgttggtaaattaatgttcttcagacgccatgctcagatagacgatcgtcagaaccatgaagatgaaggcttgcagcgtaatgatcaggatgtggaaaatggcccacggcacattcaggatccactgactccaccacggcaacagaccagcaatcagaatgaaaatcagctcaccggcatacatgttaccgaacagtcgcaaaccgagactaactggtttggacagcaggcttaccccttcaaggattaagttgacaggaatgaacgcccagtgattgaacggctgcagcgtcaactctttcgtgaagccgccgatgcctttcattttgatgctgtagaacagaatcaggataaatacgcccagtgccatagacagcgttacgttcacgtccgcagacggaaccacacgcagtgcaggcagacccagtacatgttcagcaatgtacggcagcaggtcgataggcagtaaatccatcaggttcatcaggaatacccagacgaagatcgtcagggccagcggagcaatcagcttgcttttgccatggtacatgtctttcacgctaccattaacaaagccgatcaccagctcaatcgcggtctgaaacttacctggcacaccgctggtcgcctttttggctacgctacggaataaaaccaggaacaacagacccagcaccacgctgaagaacatggagtcaatattgattgtccagaaggtggctggggggttttgtggatccaccaggctgaatgtacgcaggtccagctgaaggttattcaggtggtgtcctatgtaatcctgcggcgtcatattttcactagccatgatgccttttaccctttgttgttaattacagccggtgccagtatctgaaccaccagcaccaaaacccacgtaacgatcagcggcaagaataccgcctttaaaaccgccaacgccaccaccagtaacaccaacatcgccagaactttgaaagcttcgccaaatgcgaatgtccaggccacccggcctttcgctggtgtatgcgcctggtgacgccaggcaaatatcataaacaaaacgttaggcagaaagactgccaggcccccgcttattgcagagacgccccagaaggggtctttgaggctgaacagcaatccacttgctatcaccaccagtaactgaacgagcagaagcttccgagcaacgtttcgactcacgaggctcacagacatcacgtttttcactcctgctcccttcgaggtatgccgcgtgtcgtataaaactttctttaaggcttagagtcaagcatcaaaaagcggtcaaattatacggtgcgcccccgtgatttcaaacaataagtagccaaaaggtgaataaatgtttaaatatttttccagtgcatacaattgcgacttttctgctaaccctgttcgatcatgaaaaactgtaaataacgcgtaaacactggtgataaagcgtgcttcagatcacatattgcgcatgttcgcgcacagcatatttatttacttggcaaatgatgcctttgcaagtttatgatatttcagtctaaaaacagatactgttttaataaatgacatttacacaacaaaaaccacccattgacatttttaataatgttttaacagccaatgatggttcttagcgccgatttttagcagactgatattttcactaatgacttattttctgcttaccaaaaaaagccacgttatcttgttgatgcaaaagagtgaacgtggcgttaaatgtaaccagttatatcagtagaaaacctggttgttgttaacagtctaaccggtcaattttttatgatttttttgataaaaattaaattttatttgctttaatcaccaccagatgacgttcgccatccagggctggaacctgaagtttaaccacactttcgacctgatattcttcgggcaacaaagcgatttcatcttccggcatttgccctttcagcgcgtagaaacggccttgctcaccaggaagatggtggcaccagctcaccatatcgttcagagaggcaaaagcgcggctaattacgccatcaaatggcggctcactaggaaactcttctaccctgctctgtactggttcaatattctccagtttaagctcatgttgcacctgacgaaggaaacgcacgcgtttaccaaggctatccaacagagtgaaatgggcttcaggacgcacgatagagagtggaatgcctggcagtcctggtccggtgccgacatcgataaaccgttcaccttgcagatacggtgccaccacaatgctatcgagaatatggcgtaccagcatctcattaggatcgcggacgctagtcaggttgtacgctttgttccatttatgcagcatattcacgtaggcaataagctggtttttctggtgatcggtaaggctaatacctgcgtctttcagcagtaaggagagtttgttgagcacggtgattacctgttcttgatgcgttgcctggtaagcgggtgcttaccaggcatttttaatgcgttatgcgctacgacgcagcataccctgttttttcagccacaccagcagaatggagatggccgcaggcgtgacgccagaaatacggctagcttggccgatagaggctggtttgtgatcgttaagtttggcgatcacttcgttagaaagaccggatacctggcggtaatccagtgtcgcgggtagcagggtgttctcgttacgcagctgcttttcgatctcatcttgctggcgcgcgatataaccttcgtatttaacctgaatctcaacctgttccgccgcctgttcgtctgtcaacgcaggggcaaacggcgtcagcgtggttaatttttcataagtcatttccggacgacgcagcagatcttcaccactggcttcacgggaaagcggcgcagtcaggtgagcattcacttcggctgcagcttccgcgctcggggttacccaggtgcttttcagacgctgacgctcacgctcgatattctcaagtttctcgttaaagcgcgcccaacgttcgtcatccaccaggcccagttcacgaccgatttcagtcaaacgcagatccgcattatcttcgcgtagcatcagacgatattctgcgcggctagtaaacatacgatacggttctttggttcctaaagtgcacaggtcatcaactagtacgccgagatacgcctgagaacgtgccggagcccaaccttctttgtcagcagacagacgggcagcgttaagaccggccagcaaaccttgcgcagcggcttcttcgtaaccggtagtgccgttaatctgaccagcaaagaacagcccctggataaacttgctctccagcgtcggtttcaggtcgcgaggatcgaagaagtcatactcaatggcataacccggacgcacgatcttcgcgttttccatcccctgcatagagcggacgatttgcatctgcacatcgaacggcaggctggtggagataccgttcggataaatttcattagaggtcagtccttccggttcaaggaagatctgatgctgatttctgtcggcgaagcgcatgactttgtcttcgatgctcgggcagtagcgtgggccgacaccttcgatcacccctgcgtacattgggctacgatcgaggttactgcggatcacatcatgggttttctcgttggtatgagtgatataacacggcacctgctggggatgctgggacgcattgcccataaagctgaataccggcattgggttatcgccatgctgttgcgccagtacgctaaagtcgatggttcgagcatcaatacgcggtggtgtcccggttttcagacgaccaacgcgcagcggcagttcacgcaaacggcgagaaagcggaatggacggcggatcaccagcacggccaccgctgtaattatccagaccgatatgaattttaccgtcgaggaacgtcccaacggtgagcacgacggctttggcacggaacttcagtcccatttgggtaacagcaccgaccacgcgatcgttttcgacaataagatcttcaaccgcctgctggaagatcatcaggttcggttggttctccagcgccgtacgtaccgcctgacggtagagcacacgatccgcctgagctcgggtagcgcgaaccgccggtcctttgcttgcgtttagtatcctaaactggatacccgcctgatcgatcgctttcgccatcagaccgccgagtgcatccacttcttttaccagatgtcccttcccaataccgccgatcgccgggttgcagctcatctgccccagagtgtcgatattgtgtgtcaaaagcagagtctgttgacccatacgcgccgcggccatcgcggcctcggtgcctgcatgacccccgccaatgatgatgacgtcaaaaggatccggataaaacatggtgattgcctcgcataacgcggtatgaaaatggattgaagcccgggccgtggattctactcaactttgtcggcttgagaaagacctgggatcctgggtattaaaaagaagatctatttatttagagatctgttctattgtgatctcttattaggatcgcactgccctgtggataacaaggatccggcttttaagatcaacaacctggaaaggatcattaactgtgaatgatcggtgatcctggaccgtataagctgggatcagaatgaggggttatacacaactcaaaaactgaacaacagttgttctttggataactaccggttgatccaagcttcctgacagagttatccacagtagatcgcacgatctgtatacttatttgagtaaattaacccagcttcccagccattcttctgccggatcttccggaatgtcgtgatcaagaatgttgatcttcagtgtttcgcctgtctgttttgcaccggaatttttgagttctgcctcgagtttatcgatagccccacaaaaggtgtcatattcacgactgccaataccgattgcgccaaagcggactgcagaaagatcgggcttctgttcctgcaatgcttcatagaaaggagaaaggttgtccggaatatctccggcaccgtgggtggagctgataaccagccagatcccactggcaggtaaatcttctaacagcggaccgtgcagcgtttcggtggtaaaacccgcctcttccagcttttcagccaggtgttctgctacatattcggcaccgccgagggtgctgccgctgataagagtgatatctgccataaaccgccacctttattaagagtggcgtattgtacgctgtgaacgcgttgggatctacctgtggaaaagtatgggattaaaaaagccgatcagggcttgatggtacgcatgatcgggttttgcaggacgatcaatgtctcggtggactgaatttcatcaattgtttggatcttgttgataagtacatgctggagagcgtcgatgctacggcacatcacttttataaagatgctgtagtggccggttgtgtaataggcttcagtgacttcatcaaggctttccagctttgccagcgcggaagggtagtctttggcgctctttaatataatgccgataaagcagcctacgtcataaccgagctgcttcgggctgacatcaatacgcgccccggtaatgatccccgcctgcttcattttctctactcgaacgtgaatcgtccccggactgacgccaaattgtttcgccagttcggcgtaagcggtgcgcgcattgcccattaatgcttccaggatgccacggtccagattgtcgatcagataattttccataggattttcttatgcggattgatgattcattctattttagccttcttttttaatgaatcaaaagtgagttaggctttttattgaatgattattgcatgtgtgtcggtttttgttgcttaatcataagcaacaggacgcaggagtataaaaaatgaaaaccgcttacattgccaaacaacgtcaaattagcttcgtgaaatctcacttttctcgtcaactggaagaacgtctggggctgatcgaagtccaggcgccgattcttagccgtgtgggggatggcacgcaggataacttgagcggctgtgaaaaagcggtgcaggtaaaagtgaaagctctgcctgatgcccagttcgaagtggttcatagtctggcgaagtggaaacgtcagaccttagggcaacacgacttcagcgcgggcgaagggctgtacacgcacatgaaagcccttcgccccgatgaagaccgtctttctccgttgcacagcgtctatgttgaccagtgggactgggaacgcgtaatgggcgacggtgagcgtcaattcagcactctgaaaagcacggtagaggcgatctgggcgggaattaaagcaaccgaagctgcggttagcgaagagtttggcctggcaccgttcctgccggatcagatccacttcgtacacagccaggagttactgtctcgttatccggatcttgatgccaaagggcgtgagcgggcgatagcgaaagatcttggcgcggtattccttgtcgggattggcggcaagctgagcgatggtcatcgccacgacgtgcgcgcaccggattatgatgactggagcaccccgagtgagctgggccatgcgggtctgaacggcgatattctggtgtggaacccggtactggaagatgcgtttgagctttcctccatggggatccgtgtagatgccgacacgctgaagcatcaactggcgctgaccggtgacgaagatcgcctggagctggagtggcatcaggcgctgctgcgcggtgaaatgccgcagaccatcggcggcggtatcggccagtctcgtttgactatgctgctgctgcaactgccgcatatcggccaggttcagtgtggagtatggccagctgctgttcgcgagagcgtcccttctctgctgtaataatttatcgccgccagcgtctgagcaggcggcttcgcatcccggtatcaaagcgccagatatgatcgaaaatgcgcatgatgccgggtttgccgtgtgcgctcatcgccacggcatgaaagcgatgctgatgtacccgctgcagctctttcactttactcgtcacgtcgtcaggcaaccgctgagcgataaaatcagaaatcaccaccgcatcggcatcaaaccattccctgctttgcaagcgttccataatggcgcgaaaacaactggcaagatcggtgccgccacgaaactgctggcttaaaaaacggattgcttgttcgatgccttgtgggccactaagctcataacggacgatctcggtggaaaatagcataatatagcagcgccggttttctgcgagagcaatgcgcatcaaggccaggcagaacgctttcgcacactgttcattaaagccgcccatactgccggaagtatccacacagacaataaacggcccgcgcggctgttcatcgtaatctttatgtaccaccggacgttcgatcactttttcacgccagctctcaccgtgcaggcgataggtgagcaactgtttttccaccagccgacggtaaaactcatactccagttccgttatccctagtgtcgccagttctggcggcaggagacgtaaaatatcatcgctttgttgcagaccatcaacctgctcaggaaccgtcgccggttcgcgcaccatggtgcggaaggtttccatctgcgcatcgttgcgcggtatacttttggcttcccgagaacgccccagctgctctgccaggcgtttcagttccggctgttcgttaagaaattcaccgtatttcacaatcaactgatagtcgccacgtttaagctgaccggcgctcatatcccacagacgaccagctgcagtattgttatctgcgagaatcggttcaagttgtccgctcagcgtcatgcgttcctgaacttcactcaacagttgttcgcgttcttcttctaatagctgttgatttaacgtcgttgcttgcacgatcagacttaaacgccaacgctggagaaaaagcgtgtgtaacgcactagtgatcgtgctgttagcatcaaccaactgtcgggcttgttctgcccatggagaattcagacgatgcagtaagtccaggatctgtggtagctgcacaataaactgtggcgtggagaggagctggctttgctgatagcacatcacctcttcggtgagttccggcgggactcgggcatctttcagccgactgcgcagcgcttcacgccagcggggaacatcatcagtgattgccgccttcaggcgtgggaatttttcaaagaagaccgccagctgcggactggccagcagtgcgatgatcatctcttcgatcaatccctcttcgctgacggccagcatcacattaagcgtatccagcgttagcattgttgtgcctggcgaatctgtgcaccgacatcctgtaggctggcttcaatgcgacctaaccagtcgccagggataaacagacatttttgctgttcgctgaataaagcgtgttgcttgcgccagtcgctttcaagctcttccagttgttgttttatttcaccaggcagaccttcagcgctactaccgggaagtgccagcgtactgccttgtaaacttacatcgcgaacgacaagatgttgggcgctatcaacttccagattcagtttctgggcaaagccgataccgttcagtttaccgcgaatttcaccacctttgctcagccactgttccagcgcgctacgctcaaaggagatatgaaccacttccatatcatgcagttttaacggtttttgcagcagtagagtcagagtggaagcagtaacgttaacaggaagttgatactgctgacgacggctgaaaatgccgcccagacgaattaccgttaaggctgttttatcgctttgttgctgctggagttgcaggtgacgttgcacaatcgcgccaaggcgagtcaacatcccttgctgttgccaggcgtgaccggtcatcaatacatcaatttgttgttgtatcaaattcaggctttgcgcgtcataccacaggcaatctttcagcaaaatgagatctaccggggcaacagcactgcgaccgctaaaaaaggcgctggcctgcaataatcggatcgcttttttccagcgacgatcgctgacataaggcgcatccggtaatttatccagttgctggcgcagcataaaaatcagctcaaatacatgatcgggcagcgtaatttcaccaatctctttctgccagcgttcatattcttcatctgtgacctgcaaggcatcaggaaccggattgtcgttttcatcctgttgactggtcagcatggagcggaaattcgctttatcctgcactttatctaaccacagacgaatcagcatgcggtcatataacgcttccagactgctgtctgcttccggcagctcgttggaggccgccaccagcagacgcatcgggattttttctacgtgtgcaccgttgcggaactggcgctcgttaatggcggtgagcaaggtattaagaattgccgggcccgctttccagatctcatccagaaagacaatttctgcttccggcaggtaaccgctggttaaacgttcatagcgcccttcatcttttagcgcctgaatagaaaggggaccaaaaacttcttccggcgtggagaagcgggtcatcagatattcaaacgcgcgggcattctgaaaggcgaattttaagcgccgggcgatcaaacttttggcaatacctggcgggccaaggaggaacacactttcaccacttaatgccgctaataaacacaagcggatggcgtggctacgttcataaagccccttttccaagctactgctcaggcgggaaattctttccgctaataaatgagggtgagccataatgaagtggcgtcctttcgtcaaaagttctgcgtaaattgcgagtatagacgtttcttgctggtggctaaaatagtctcaaagggggggtatttttctttgagccaggttaatgtggccgcatttaggagtacgattttgccgttaatcgtgcatactgtgcgcttttttgtgggccaagggactaagcacacatttcatatttcaacgaaagactagtctatgagcactgataataagcaaagtttgcccgcgattaccctcgcggcgattggagttgtctacggcgatattggtaccagcccgttatatacacttcgtgaatgtttgtccggccagtttggttttggcgttgaacgcgatgccgtgtttggctttttaagcctgatcttctggctgctaatctttgtggtttccattaaatatctcaccttcgtgatgcgggcagataacgccggtgagggggggatcctgacgttgatgagccttgccgggcgtaatacgagcgcgcgaaccacaagtatgctggtgattatggggctaatcggcggcagctttttctatggtgaagtcgtcataacacccgctattagcgtgatgagtgccattgaaggtctggaaatcgtcgccccgcagctggatacctggatagttcccctcagtattatcgttctcactttattatttatgattcaaaaacatggcacggctatggtcggtaagctgtttgcgccgatcatgctgacctggtttttgattctggcaggactggggttacgtagcattattgctaacccggaagtgctgcatgcgctgaatccaatgtgggcggtgcatttcttccttgaatacaaaacggtttcttttattgcattaggggcagtggtgttgagcattacgggggtcgaggcgctgtatgctgatatggggcactttggtaagttccctattcgcctggcgtggttcaccgtcgtattaccttccttgacccttaattacttcggtcagggagcgctgttgttaaagaacccggaagcgattaagaacccgttcttcctgttggcaccggactgggcgctgatcccgctgctgatcatcgccgcactggcgacggtaattgccagccaggcggttatctctggcgtcttcagtttgacgcgtcaggcggtacgtctgggatatttgagcccgatgcgcattattcacacctccgaaatggagagtgggcaaatctatattccgtttgtgaactggatgctctatgtcgcggtcgtgattgtgattgtcagctttgagcactccagcaacctggcggcggcgtacgggattgcggtgaccggaaccatggtgctgacgtctattctcagcactaccgtggcacgtcagaactggcactggaataagtattttgttgcgctgatcctgattgctttcctttgtgtcgatattccattgttcaccgctaacctcgataaactgctctccggcggctggttgccattgagcctcggtactgtgatgtttatcgtgatgaccacctggaagagcgagcgtttccgcttgctgcggcggatgcatgaacatggtaactctctggaagcgatgattgctagcctggagaaaagtccgcctgttcgcgtgcccgggaccgcggtgtatatgagccgtgcaatcaacgtcattccctttgcgctgatgcataaccttaaacataacaaggtattgcatgagcgggtgattctgttaactctgcgcaccgaagacgctccatatgtccataacgtccgtcgggtacagattgaacaactgagccccactttctggcgcgtggtggcaagttatggttggcgagaaacgccaaacgtagaagaagttttccaccgctgcggtctggaaggattaagttgccggatgatggaaacctccttctttatgagccatgagagcttgatcctcggcaaacgcccgtggtatttgcgtctgcgcggcaagctgtacttgctgctgcaacgtaatgcgctgcgtgcaccagatcaatttgaaatcccgccaaacagggttatcgaactgggtactcaggtcgaaatctaacgccagacgcctcctttcttcataagggggcgtttttgttttcatggttaatcaccatgtaaaacgtttcgaggttgatcacatttccgtaacgtcacgatggttttcccaactcagtcaggattaaactgtgggtcagcgaaacgtttcgctgatggagaaaaaaatgaaaaaaggcaccgttcttaattctgatattagtagcgtgatctcccgtctgggacataccgatacgctggtggtgtgtgatgctggtttacccatccccaaaagtacaacgcgtatcgatatggcattaacccagggtgtaccttcttttatgcaggtgctgggcgtcgtcacaaatgaaatgcaggtcgaggcggccattatcgcggaagagatcaaacaccataatccgcaactccacgaaacgttgctcactcaccttgagcagctgcaaaaacaccagggaaataccattgaaattcgttacaccacgcatgaacaattcaaacaacaaaccgcagaaagtcaggcggtaattcgcagcggagaatgttctccgtatgcgaatatcattctctgtgctggcgtgacgttctgaggccgtcatggaagcattacttcagcttaaaggcatcgataaagccttcccgggcgtaaaagccctcagcggcgcagcgttaaatgtctatccgggccgcgtgatggcgctggtgggcgaaaacggcgcgggtaaatccaccatgatgaaagtgcttactggcatctatactcgcgatgccggtacgcttttatggctggggaaagaaacgacatttaccgggccaaaatcttcccaggaagccgggattgggattatccatcaggaactgaacctgatcccgcagttgaccattgccgaaaacattttcctcggtcgtgagtttgttaatcgctttggcaaaattgactggaaaaccatgtatgccgaagcggataaattgctggctaaacttaacctgcgctttaaaagcgacaagctggtgggcgatctttccatcggtgaccagcaaatggttgaaatcgccaaagtgctgagctttgagagcaaagtcatcattatggatgaaccgaccgatgcgctgaccgataccgaaaccgaatccctgttccgcgtcatccgcgagctgaaaagccaaggccgcggtattgtctatatctcccaccgcatgaaagaaatcttcgagatttgcgatgacgttaccgtttttcgtgatgggcaatttattgctgagcgcgaagtggcaagtctgaccgaagatagcctgattgagatgatggtgggtcgcaagctggaagatcaatatccgcacctggacaaagcgccgggagatatccgcctgaaagtcgataatctctgcggacctggcgttaacgatgtctcttttactttacgcaaaggcgaaattcttggcgtctctggtttgatgggcgcaggtcgtaccgaactgatgaaagtgctctacggcgcactaccgcgcaccagcggttacgtcaccctggatgggcatgaagtcgttacccgtagtccgcaggatggcctggcaaacggcattgtgtatatctccgaagaccgtaaacgtgacggtttagtgttgggcatgagtgtaaaagagaacatgagcctgacagcgctgcgctacttcagccgcgctggcggcagtttgaagcatgccgatgaacagcaggctgtgagtgatttcattcgtctgtttaatgtgaaaactccgagcatggaacaggcaattggtctgctttccggtggcaatcagcaaaaagtggcgattgcccgcggtctgatgacacgccccaaagtgttgatccttgatgaacctacccgtggcgtagatgtcggcgcgaaaaaagagatctatcaactgattaaccagttcaaagccgatggcttgagcatcattctggtgagtagcgagatgccagaagtattaggcatgagcgatcgcatcatcgtcatgcatgaagggcatctcagcggggaatttactcgtgagcaggccacccaggaagtgttaatggctgccgctgtgggcaagcttaatcgcgtgaatcaggagtaaaaaaatgacaacccagactgtctctggtcgccgttatttcacgaaagcgtggctgatggagcagaaaagccttatcgctctgctggtgctgatcgcgattgtcagcacgttaagcccgaactttttcaccatcaataacttattcaatattctccagcaaaccagtgtgaacgccattatggcggtcgggatgacgctggtgatcctgacgagcggcatcgacttaagcgtaggttctctgttggcgctgaccggcgcagttgctgcatctatcgtcggcattgaagtcaatgcgctggtggctgtcgctgctgctctcgcgttaggtgccgcaattggtgcggtaaccggggtgattgtagcgaaaggtcgcgtccaggcgtttatcgctacgctggttatgatgcttttactgcgcggcgtgaccatggtttataccaacggtagcccagtgaataccggctttactgagaacgccgatctgtttggctggtttggtattggtcgtccgctgggcgtaccgacgccagtctggatcatggggattgtcttcctcgcggcctggtacatgctgcatcacacgcgtctggggcgttacatctacgcgctgggcggcaacgaagcggcaacgcgtctttctggtatcaacgtcaataaaatcaaaatcatcgtctattctctttgtggtctgctggcaagcctggccgggatcattgaagtggcgcgtctctcctccgcacaacccacggcggggactggctatgagctggatgctattgctgcggtggttctgggcggtacgagtctggcgggcggaaaaggtcgcattgttgggacgttgatcggcgcattaattcttggcttccttaataatggattgaatttgttaggtgtttcctcctattaccagatgatcgtcaaagcggtggtgattttgctggcggtgctggtagacaacaaaaagcagtaataacgactacaggacatcttgaatatgaacatgaaaaaactggctaccctggtttccgctgttgcgctaagcgccaccgtcagtgcgaatgcgatggcaaaagacaccatcgcgctggtggtctccacgcttaacaacccgttctttgtaagcctgaaagatggcgcgcagaaagaggcggataaacttggctataacctggtggtgctggactcccagaacaacccggcgaaagagctggcgaacgtgcaggacttaaccgttcgcggcacaaaaattctgctgattaacccgaccgactccgacgcagtgggtaatgctgtgaagatggctaaccaggcgaacatcccggttatcactcttgaccgccaggcaacgaaaggtgaagtggtgagccacattgcttctgataacgtactgggcggcaaaatcgctggtgattacatcgcgaagaaagcgggtgaaggtgccaaagttatcgagctgcaaggcattgctggtacatccgcagcccgtgaacgtggcgaaggcttccagcaggccgttgctgctcacaagtttaatgttcttgccagccagccagcagattttgatcgcattaaaggtttgaacgtaatgcagaacctgttgaccgctcatccggatgttcaggctgtattcgcgcagaatgatgaaatggcgctgggcgcgctgcgcgcactgcaaactgccggtaaaagcgatgtgatggtcgtcggatttgacggtacaccggatggcgaaaaagcggtgaatgatggcaaactagcagcgactatcgctcagctacccgatcagattggcgcgaaaggcgtcgaaaccgcagataaagtgctgaaaggcgagaaagttcaggctaagtatccggttgatctgaaactggttgttaagcagtaattttaatcaggttgtatgacctgatggtgacataaatacgtcatcgacagatgaacgtgtaatataaagaaaagcagggcacgcgccaccctaacacggtggcgcattttatggacatcccgaatatgcaaaacgcaggcagcctcgttgttcttggcagcattaatgctgaccacattcttaatcttcaatcttttcctactccaggcgaaaccgtaaccggtaaccactatcaggttgcatttggcggcaaaggcgcgaatcaggctgtggctgctgggcgtagcggtgcgaatatcgcgtttattgcctgtacgggtgatgacagcattggtgagagcgttcgccagcagctcgccactgataacattgatattactccggtcagcgtgatcaaaggcgaaagtacaggtgtggcgctgatttttgttaatggcgaaggtgagaatgtcatcggtattcatgccggcgctaatgctgccctttccccggcgctggtggaagcgcaacgtgagcgtattgccaacgcgagtgcattattaatgcagctggaaagtccactcgaaagtgtgatggcagcggcgaaaatcgcccatcaaaataagactatcgttgcgcttaacccggctccggctcgcgaacttcctgacgaactgctggcgctggtggacattattacgccaaacgaaacggaagcagaaaagctcaccggtattcgtgttgaaaatgatgaagatgcagcgaaggcggcgcaggtactgcatgaaaaaggtatccgtactgtactgattactttaggaagtcgtggtgtatgggctagcgtgaatggtgaaggtcagcgcgttcctggattccgggtgcaggctgtcgataccattgctgccggagatacctttaacggtgcgttaatcacggcattgctggaagaaaaaccattgccagaggcgattcgttttgcccatgctgccgctgcgattgccgtaacacgtaaaggcgcacaaccttccgtaccgtggcgtgaagagatcgacgcatttttagacaggcagaggtgacgcttggctacaatgaaagatgttgcccgcctggcgggcgtttctaccagtacagtttctcacgttatcaataaagatcgcttcgtcagtgaagcgattaccgccaaagttgaagcggcgattaaagaactcaattacgcgccaagtgctctggcgcgtagcctcaaactcaatcaaacacataccattggcatgttgatcactgccagtaccaatcctttctatagtgaactggtgcgtggcgttgaacgcagctgcttcgaacgcggttatagtctcgtcctttgcaataccgaaggcgatgaacagcggatgaatcgcaatctggaaacgctgatgcaaaaacgcgttgatggcttgctgttactgtgcaccgaaacgcatcaacctagccgtgaaatcatgcaacgttatccgacagtgcctactgtgatgatggactgggctccgttcgatggcgacagcgatcttattcaggataacagcttgctgggcggagacttagcaacgcaatatctgatcgataaaggtcatacccgtatcgcctgtattaccggcccgctggataaaactccggcgcgcctgcggttggaaggttatcgggcggcgatgaaacgtgcgggtctcaacattcctgatggctatgaagtcactggtgattttgaatttaacggcgggtttgacgctatgcgccaactgctaagtcatccgctgcgtcctcaggccgtctttaccggaaatgacgctatggctgttggcgtttaccaggcgttatatcaggcagagttacaggttccgcaggatatcgcggtgattggctatgacgatatcgaactggcaagctttatgacgccaccattaaccactatccaccaaccgaaagatgaactgggggagctggcgattgatgtactcatccatcggataacccagccgacccttcagcaacaacgattacaacttactccgattctgatggaacgcggtagcgcttaattactcgctttcacttggaacgcggttcggcttagatttacgctgtcttttgatcaaattattaccatcggttgttttcagaagcatgaacattgctgcactagcaacagtaataatgcccattgtgataaacgtatagtggaattgttcgacagtcgttgtgccttccattccttcataaacgcgaaggacggccgcacttacagcaacgcctaaactaatgctcagttgctgcgtgaccgccagaacactgttaccgctgctggcattgtcatcggtcagatcggcaagtgtgatggtattcatcgcggtaaactgcgtgctcatagccatccctaatataaacaacggcaagatcagcatccatatagccattgctggactttgcaaagagaactgagcgatcattagcccaataatcaccgtgatccccactaacgtatggcgatagcccagacgacgtaagacttgggtaaccatgctttttgcaataatggaacctaacgctgtcggtgccatcatacagccagcaataaacgcctgataaccaaatcctacctgtaacatcaatggcataaggaacggtacacagccggtccccagacgggttgcaatattgcctacgataccgatgctgaaagtgcgggttttaaataaatctaaactaattaatgggtttggcgtgcgtcgtgcatggagaatatagagaagcagtaacccgatgctggtgacaattaccgtcaaggcaatccagctggcgacaatcttttccccgaatagctctattccgctactgaagagaacaaggctgaggccaaacagcaaaaagccagtgatatcgaatctgcgtcgtgcggtggtgaaattgggcatatgtttgcgcgcgtaaagaaggcccgcaatacctatggggatattgattaaaaatatccagtgccaggttgcccaggtgaccagcacgccgccaagaacggggcctaaaattggccccaccagacccggcatggcgacaaaattcaatactggaagaagttcattacgaggataagcgcgcagtaaggccagccgagcaacaggcatcatcattgcgccgcctatcccctgaataacccggaagacaaccagctgtggtaggctattagaaagtgcgcaggccagagaacccaatgtgaacagactcacggcaagggtaaaaatgcgacgcgtaccgaagcgatcggctagccatccgcttaccggaataagcatcgccaccgtcagcgtataactgatgatggcactttgcatcgcgagaggagaacgattaaggctatgagcgattgcgggtaaggcggtattaagaatagtggcatcaagtgcctgcatgaagaaggccatcgccgcgatccacggcaaacccgccatactgcgcttctttttatcgctcattcaatgtcctgttatcgggttatcacttatcaggactgcgtagcagcgcctgacaagctttaaatgccgcgtcgccatcgctttggataatcgcatcgacaatcgcctgatgcagatccagctttatcactgtgtcgctggtaatactcgtgaagtaagtgtgataaacgctatggaataggctggcgaaactggtcaaaaacggattggcgctcatttcatagatatgctcatgccaggccatatcgacttcgatccagcgttcacggcgaaagttctcttttaatgccgccatttcggccattaacgtattgagatgcgctttctgttccgcggtgccaaccgttgctgccagtaggcaggcttgcggctccagacagatacgcataaccagaaagtgatcgatgacctgatgaaagttctcttctgtcatccaccaggtaagcaattcctgatcaagaaaattccagttgctttgtggcatgacccgagtaccaattcgcggtcgcggtaaaaccatcccttttgccgttaacgttttgaccgcttcgcgtaccgctgtacgactcactccaaattgctcgcccagctcaatctcaccgggcaaaatggtgccgggttcatattcaccttttaagatccgttgcgccagcttctcagccagaacatagctaaggtttttctgtgcagctaactgttgtgcgcttaaaggcattacttatcttcctttttctttttattcctccttagtatgccaccaggaagtgtgattacggttgcaaaaacggcaaattgcttgttttatggcacattaacggggcttttgctgaaaaaatgcgcggtcagaaaattattttaaatttcctcttgtcaggccggaataactccctataatgcgccaccactgacacggaacaacggcaaacacgccgccgggtcagcggggttctcctgagaactccggcagagaaagcaaaaataaatgcttgactctgtagcgggaaagcgtattatgcacaccccgcgccgctgagaaaaagcaaagcggcactgctctttaacaatttatcagacaatctgtgtgggcactcgaagatacggattcttaacgtcgcaagacgaaaaatgaataccaagtctcaagagtgaacacgtaattcattacgaagtttaattctttgagcatcaaacttttaaattgaagagtttgatcatggctcagattgaacgctggcggcaggcctaacacatgcaagtcgaacggtaacaggaaacagcttgctgtttcgctgacgagtggcggacgggtgagtaatgtctgggaaactgcctgatggagggggataactactggaaacggtagctaataccgcataacgtcgcaagaccaaagagggggaccttcgggcctcttgccatcagatgtgcccagatgggattagctagtaggtggggtaacggctcacctaggcgacgatccctagctggtctgagaggatgaccagccacactggaactgagacacggtccagactcctacgggaggcagcagtggggaatattgcacaatgggcgcaagcctgatgcagccatgccgcgtgtatgaagaaggccttcgggttgtaaagtactttcagcggggaggaagggagtaaagttaatacctttgctcattaacgttacccgcagaagaagcatcggctaactccgtgccagcagccgcggtaatacggagggtgcaagcgttaatcggaattactgggcgtaaagcgcacgcaggcggtttgttaagtcagatgtgaaatccccgggctcaacctgggaactgcatctgatactggcaagcttgagtctcgtagaggggggtagaattccaggtgtagcggtgaaatgcgtagagatctggaggaataccggtggcgaaggcggccccctggacgaagactgacgctcaggtgcgaaagcgtggggagcaaacaggattagataccctggtagtccacgccgtaaacgatgtcgacttggaggttgtgcccttgaggcgtggcttccggagctaacgcgttaagtcgaccgcctggggagtacggccgcaaggttaaaactcaaatgaattgacgggggcccgcacaagcggtggagcatgtggtttaattcgatgcaacgcgaagaaccttacctggtcttgacatccacggaagttttcagagatgagaatgtgccttcgggaaccgtgagacaggtgctgcatggctgtcgtcagctcgtgttgtgaaatgttgggttaagtcccgcaacgagcgcaacccttatcctttgttgccagcggtccggccgggaactcaaaggagactgccagtgataaactggaggaaggtggggatgacgtcaagtcatcatggcccttacgaccagggctacacacgtgctacaatggcgcatacaaagagaagcgacctcgcgagagcaagcggacctcataaagtgcgtcgtagtccggattggagtctgcaactcgactccatgaagtcggaatcgctagtaatcgtggatcagaatgccacggtgaatacgttcccgggccttgtacacaccgcccgtcacaccatgggagtgggttgcaaaagaagtaggtagcttaaccttcgggagggcgcttaccactttgtgattcatgactggggtgaagtcgtaacaaggtaaccgtaggggaacctgcggttggatcacctccttaccttaaagaagcgttctttgcagtgctcacacagattgtctgataggaagtgaaaagcaaggcgtcttgcgaagcagactgatacgtccccttcgtctagaggcccaggacaccgccctttcacggcggtaacaggggttcgaatcccctaggggacgccacttgctggtttgtgagtgaaagtcacctgccttaatatctcaaaactcatcttcgggtgatgtttgagatatttgctctttaaaaatctggatcaagctgaaaattgaaacactgaacaacgaaagttgttcgtgagtctctcaaattttcgcaacacgatgatgaatcgaaagaaacatcttcgggttgtgaggttaagcgactaagcgtacacggtggatgccctggcagtcagaggcgatgaaggacgtgctaatctgcgataagcgtcggtaaggtgatatgaaccgttataaccggcgatttccgaatggggaaacccagtgtgtttcgacacactatcattaactgaatccataggttaatgaggcgaaccgggggaactgaaacatctaagtaccccgaggaaaagaaatcaaccgagattcccccagtagcggcgagcgaacggggagcagcccagagcctgaatcagtatgtgtgttagtggaagcgtctggaaaggcgcgcgatacagggtgacagccccgtacacaaaaatgcacatattgtgagctcgatgagtagggcgggacacgtggtatcctgtctgaatatggggggaccatcctccaaggctaaatactcctgactgaccgatagtgaaccagtaccgtgagggaaaggcgaaaagaaccccggcgaggggagtgaaaaagaacctgaaaccgtgtacgtacaagcagtgggagcacgcttaggcgtgtgactgcgtaccttttgtataatgggtcagcgacttatattctgtagcaaggttaaccgaataggggagccgaagggaaaccgagtcttaactgggcgttaagttgcagggtatagacccgaaacccggtgatctagccatgggcaggttgaaggttgggtaacactaactggaggaccgaaccgactaatgttgaaaaattagcggatgacttgtggctgggggtgaaaggccaatcaaaccgggagatagctggttctccccgaaagctatttaggtagcgcctcgtgaattcatctccgggggtagagcactgtttcggcaagggggtcatcccgacttaccaacccgatgcaaactgcgaataccggagaatgttatcacgggagacacacggcgggtgctaacgtccgtcgtgaagagggaaacaacccagaccgccagctaaggtcccaaagtcatggttaagtgggaaacgatgtgggaaggcccagacagccaggatgttggcttagaagcagccatcatttaaagaaagcgtaatagctcactggtcgagtcggcctgcgcggaagatgtaacggggctaaaccatgcaccgaagctgcggcagcgacgcttatgcgttgttgggtaggggagcgttctgtaagcctgcgaaggtgtgctgtgaggcatgctggaggtatcagaagtgcgaatgctgacataagtaacgataaagcgggtgaaaagcccgctcgccggaagaccaagggttcctgtccaacgttaatcggggcagggtgagtcgacccctaaggcgaggccgaaaggcgtagtcgatgggaaacaggttaatattcctgtacttggtgttactgcgaaggggggacggagaaggctatgttggccgggcgacggttgtcccggtttaagcgtgtaggctggttttccaggcaaatccggaaaatcaaggctgaggcgtgatgacgaggcactacggtgctgaagcaacaaatgccctgcttccaggaaaagcctctaagcatcaggtaacatcaaatcgtaccccaaaccgacacaggtggtcaggtagagaataccaaggcgcttgagagaactcgggtgaaggaactaggcaaaatggtgccgtaacttcgggagaaggcacgctgatatgtaggtgaagcgacttgctcgtggagctgaaatcagtcgaagataccagctggctgcaactgtttattaaaaacacagcactgtgcaaacacgaaagtggacgtatacggtgtgacgcctgcccggtgccggaaggttaattgatggggtcagcgcaagcgaagctcttgatcgaagccccggtaaacggcggccgtaactataacggtcctaaggtagcgaaattccttgtcgggtaagttccgacctgcacgaatggcgtaatgatggccaggctgtctccacccgagactcagtgaaattgaactcgctgtgaagatgcagtgtacccgcggcaagacggaaagaccccgtgaacctttactatagcttgacactgaacattgagccttgatgtgtaggataggtgggaggctttgaagtgtggacgccagtctgcatggagccgaccttgaaataccaccctttaatgtttgatgttctaacgtggacccgtgatccgggttgcggacagtgtctggtgggtagtttgactggggcggtctcctcctaaagagtaacggaggagcacgaaggttggctaatcctggtcggacatcaggaggttagtgcaatggcataagccagcttgactgcgagcgtgacggcgcgagcaggtgcgaaagcaggtcatagtgatccggtggttctgaatggaagggccatcgctcaacggataaaaggtactccggggataacaggctgataccgcccaagagttcatatcgacggcggtgtttggcacctcgatgtcggctcatcacatcctggagctgaagtaggtcccaagggtatggctgttcgccatttaaagtggtacgcgagctgggtttagaacgtcgtgagacagttcggtccctatctgccgtgggcgctggagaactgaggggggctgctcctagtacgagaggaccggagtggacgcatcactggtgttcgggttgtcatgccaatggcactgcccggtagctaaatgcggaagagataagtgctgaaagcatctaagcacgaaacttgccccgagatgagttctccctgactccttgagagtcctgaaggaacgttgaagacgacgacgttgataggccgggtgtgtaagcgcagcgatgcgttgagctaaccggtactaatgaaccgtgaggcttaaccttacaacgccgaagatgttttggcggatgagagaagattttcagcctgatacagattaaatcagaacgcagaagcggtctgatgaaacagaatttgcctggcggccgtagcgcggtggtcccacctgaccccatgccgaactcagaagtgaaacgccgtagcgccgatggtagtgtggggtctccccatgcgagagtagggaactgccaggcatcaaattaagcagtaagccggtcataaaaccggtggttgtaaaagaattcggtggagcggtagttcagtcggttagaatacctgcctgtcacgcagggggtcgcgggttcgagtcccgtccgttccgccaccctaattaggggcgtagttcaattggtagagcaccggtctccaaaaccgggtgttgggagttcgagtctctccgcccctgccagaaatcatccttagcgaaagctaaggattttttttatctgaaataaccctctccgaagtaaatccttctaccggcatccttgccagccattcatattaatacacttcatccagcacgttaattttcaaaagatcgcgaatcaacgcatttttatcgctattttgcagccatatggcataaagcggccgactaagtgttgtgctatcgacaacggtatgcaggccgccttttttacgcgcccagctgacgggtagccaggtgcaaccattaagcatcgcaatctgttgctgtgccagttcagcagaactggttgtcagaatgggcacttcgtcagcaccgatcaaacctgcctcatgctgttgaaaatctggcccccactcaagtcgcagataattaagatctccctttagtttactaggggcactggtataaagcgctaaagtgaaatatcccagcaactgactactaaattcgtccattttgggcgcttcagtggtaataagaagatcaagctggcgttcatgcagctgttttaccagagactgccgttgggcaattcgcgcttcgaactgtaagcctgtatgggcatcctgattttgatacaagcgtcccagccactgattaagcatacattcccacaagctggcgctggcaccgatagaaaactcgttatgtcgactggtatgcgccacctccttacgggcggcctgccaggtgctcatgagcgtttctgcataaggcagtagtttttcaccggcagcggttaaacggatattgtttctgtggcgggtgaaaaggttcacacccagttgattttccagttgtctgattcgaaagctcactgcactctgggtcagatagaggctttcagccgctcgaccaaagtgacgcgttcggctaacttccaggaaagtttttaacaattccgtatccacagtgctctccgcaaaattatttgtcgttatgatttaaatgttttgttttacactctgtcaagcgtaactaatactccgcgccataactagctcggtcaaagaattaggagcgtgcaggatggcggaaagctttacgacgactaatcgatatttcgacaataaacattatccacgtggattctctcgtcatggtgatttcaccatcaaagaggcacaactgcttgagcgtcatggttatgccttcaatgagttggatcttggcaaacgcgagccggttaccgaggaagagaaactcttcgtagcagtatgccgtggcgaacgtgagccagtgacagaagcagaacgcgtgtggtccaagtatatgacgcgtattaagcgtccaaaacgttttcacaccctttccggcggtaaaccgcaggttgaaggtgctgaagactacaccgattctgacgattaataaaaagggcgaaatgccctttttttatgtcagtagtttctgcagatggatgagcaaacggtcaatcgctcgatagctaactgcctcctgcaaatgctgacgtgtgataatgtcagactgatcaatatcagcaatggttcgtgcaactttcaataaccgctgccaggcacgaatgcttaaccccagatggatcagtgttccttccaaccacatcgcatcttcgctctcaagtttgcagaattggcgtatttccggactatccagccaggcattcagtttattctgccgcttaaattggcgctctctggcggccattacgcgttgtttaacggtggcgctgctttctcccggcactaccgttttactcaaaatgccggggggtggtaatgggatctccagactgagatcgaagcggtcgagaaagggcccgctgagccggttgagataacgtaatgtctgttctggcgtgcagcggttatggtttccctgataatgtccggtagggctgggattcatcgccgcaacaagctggaaacgggctggataggttatttttgctcgtgtgcgactaagatggatctgcccggattcaatcggctctcgcaaggcatccagtgtacgccgttcaaattcaggtagctcatcaagaaaaagcacgccgttatgcgccaggctaatttcaccgggccctggaattgcgccaccgcctaccatcgcagttaagcttgcactgtgatgaggactgcggaacgggcgctgccgccattgtttttgtacactttcagcatttaccagacttaatatcgcagcactctccagtgcctcttcattgcttaaatctggcaacaggccattaatacggctggcgagcattgttttacctgttcccggcggcccaatcagtaaaaggttgtgcccgccagcagcggtaatttccagtcctcgctttccttgttcctgaccgataacatcactgagatcatgttgtagcgcccgggatactgcatcagttggtttcgggcgttcgagagcgtgcttaccttccagaaacgcacagacagcttgcagatgatcggctatcaggcatccttcaccgttaattagccccacttcatcttcgttatctttcgcgacgataatttttctgccgctcttaatagcttcagttgcactggagattgcgccgggaacgccacgcagagcgcctgtaagcgccagttctccgactaattcatattcatctaacttattggctgtaagctgttcactggccgccagcaacgcaatggcgataggtaaatcatatcgtcccccttcttttggcagatcagctggagccaggttgatggtgatttttttcgccggatattcatatccgctattgataatggcgctgcgcacgcgatcgcgagcttcttttaccgttgtttctggtaagcccaccatcgttaagccgggtagacctttactgatatgtacctcaacagtgatcgggggcgcatttactcccagggctgcgcgggtatgaacaatactcagactcataagccctccttgagtcaccattatgtgcataagatatcgctgctgtagcccgctaattcgtgaattttagtggctgattcctgtttatttgtgcaagtgaagttgagttgttctggcggtggaatgatgctcgcaaaaatgcagcggacaaaggatgaactacgaggaagggaacaacattcatactgaaattgaatttttttcactcactattttatttttaaaaaacaacaatttatattgaaattattaaacgcatcataaaaatcggccaaaaaatatcttgtactatttacaaaacctatggtaactctttaggcattccttcgaacaagatgcaagaaaagacaaaatgacagcccttctacgagtgattagcctggtcgtgattagcgtggtggtgattattatcccaccgtgcggggctgcacttggacgaggaaaggcttaaagatcaagccttaacgaactaagacccccgcaccgaaaggtccgggggttttttttgaccttaaaaacataaccgaggagcagacaatgaataacagcacaaaattctgtttctcaagattcaggacggggaactaactatgaatggcgcacagtgggtggtacatgcgttgcgggcacagggtgtgaacaccgttttcggttatccgggtggcgcaattatgccggtttacgatgcattgtatgacggcggcgtggagcacttgctatgccgacatgagcagggtgcggcaatggcggctatcggttatgctcgtgctaccggcaaaactggcgtatgtatcgccacgtctggtccgggcgcaaccaacctgataaccgggcttgcggacgcactgttagattccatccctgttgttgccatcaccggtcaagtgtccgcaccgtttatcggcactgacgcatttcaggaagtggatgtcctgggattgtcgttagcctgtaccaagcacagctttctggtgcagtcgctggaagagttgccgcgcatcatggctgaagcattcgacgttgcctgctcaggtcgtcctggtccggttctggtcgatatcccaaaagatatccagttagccagcggtgacctggaaccgtggttcaccaccgttgaaaacgaagtgactttcccacatgccgaagttgagcaagcgcgccagatgctggcaaaagcgcaaaaaccgatgctgtacgttggcggtggcgtgggtatggcgcaggcagttccggctttgcgtgaatttctcgctgccacaaaaatgcctgccacctgtacgctgaaagggctgggcgcagtagaagcagattatccgtactatctgggcatgctggggatgcacggcaccaaagcggcaaacttcgcggtgcaggagtgtgacctgctgatcgccgtgggcgcacgttttgatgaccgggtgaccggcaaactgaacaccttcgcgccacacgccagtgttatccatatggatatcgacccggcagaaatgaacaagctgcgtcaggcacatgtggcattacaaggtgatttaaatgctctgttaccagcattacagcagccgttaaatcaatgactggcagcaacactgcgcgcagctgcgtgatgaacattcctggcgttacgaccatcccggtgacgctatctacgcgccgttgttgttaaaacaactgtcggatcgtaaacctgcggattgcgtcgtgaccacagatgtggggcagcaccagatgtgggctgcgcagcacatcgcccacactcgcccggaaaatttcatcacctccagcggtttaggtaccatgggttttggtttaccggcggcggttggcgcacaagtcgcgcgaccgaacgataccgttgtctgtatctccggtgacggctctttcatgatgaatgtgcaagagctgggcaccgtaaaacgcaagcagttaccgttgaaaatcgtcttactcgataaccaacggttagggatggttcgacaatggcagcaactgttttttcaggaacgatacagcgaaaccacccttactgataaccccgatttcctcatgttagccagcgccttcggcatccatggccaacacatcacccggaaagaccaggttgaagcggcactcgacaccatgctgaacagtgatgggccatacctgcttcatgtctcaatcgacgaacttgagaacgtctggccgctggtgccgcctggcgccagtaattcagaaatgttggagaaattatcatgatgcaacatcaggtcaatgtaagcgctcgcttcaatccagaaaccttagaacgtgttttacgcgtggtgcgtcatcgtggtttccacgtctgcagtatgaatatggccgccgccagcgatgcacaaaatataaatatcgaattgaccgttgccagcccacggagcgtcgacttactgtttagtcagttaaataaactggtggacgtcgcacacgttgccatctgccagagcacaaccacaagtcaacaaatccgcgcctgagcgcaaaaggaatataaaaatgaccacgaagaaagctgattacatttggttcaatggggagatggttcgctgggaagacgcgaaggtgcatgtgatgagccacgcgctgcactatggcactagcgtttttgaaggcatccgttgctacgacagccacaaaggaccggttgtattccgccatcgtgagcatatgcagcgtctgcatgactccgccaaaatctatcgcttcccggttagccagagcattgatgagctgatggaagcttgtcgtgacgtgatccgcaaaaacaatctcaccagcgcctatatccgtccgctgatcttcgtcggtgatgttggcatgggagtaaacccgccagcgggatacagtaccgacgtgattatcgctgctttcccgtggggagcgtatctgggcgcagaagcgctggagcaggggatcgatgcgatggtttcctcctggaaccgcgcagcaccaaacaccatcccgacggcggcaaaagccggtggtaactacctctcttccctgctggtgggtagcgaagcgcgccgccacggttatcaggaaggtatcgcgctggatgtgaacggttatatctctgaaggcgcaggcgaaaacctgtttgaagtgaaagatggtgtgctgttcaccccaccgttcacctcctccgcgctgccgggtattacccgtgatgccatcatcaaactggcgaaagagctgggaattgaagtacgtgagcaggtgctgagccgcgaatccctgtacctggcggatgaagtgtttatgtccggtacggcggcagaaatcacgccagtgcgcagcgtagacggtattcaggttggcgaaggccgttgtggcccggttaccaaacgcattcagcaagccttcttcggcctcttcactggcgaaaccgaagataaatggggctggttagatcaagttaatcaataaatacaaaaaatgggacggcacgcaccgtcccatttacgagacagacactgggagtaaataaagtatgcctaagtaccgttccgccaccaccactcatggtcgtaatatggcgggtgctcgtgcgctgtggcgcgccaccggaatgaccgacgccgatttcggtaagccgattatcgcggttgtgaacagcttcacccaatttgtaccgggtcacgtccatctgcgcgatctcggtaaactggtcgccgaacaaattgaagcggctggcggcgttgccaaagagttcaacaccattgcggtggatgatgggattgccatgggccacggggggatgctttatagtctgccatctcgcgaactgatcgctgattccgttgagtatatggtcaacgcccactgcgccgacgccatggtctgcatctctaactgcgacaaaatcaccccggggatgctgatggcttccctgcgcctgaatattccggtgatctttgtttccggcggcccgatggaggccgggaaaaccaaactttccgatcagatcatcaagctcgatctggttgatgcgatgatccagggcgcagacccgaaagtatctgactcccagagcgatcaggttgaacgttccgcgtgtccgacctgcggttcctgctccgggatgtttaccgctaacagtatgaactgcctgaccgaagcgctgggcctgagccagccgggcaacggcagcctgctggcaacccacgccgaccgtaagcagctgttccttaatgctggtaaacgcattgttgaattgaccaaacgttattacgagcaaaacgacgaaagtgcactgccgcgtaatatcgccagtaaggcggcgtttgaaaacgccatgacgctggatatcgcgatgggtggaagcactaacaccgtacttcacctgctggcggcggcgcaggaagcggaaatcgacttcaccatgagtgatatcgataagctttcccgcaaggttccacagctgtgtaaagttgcgccgagcacccagaaataccatatggaagatgttcaccgtgctggtggtgttatcggtattctcggcgaactggatcgcgcggggttactgaaccgtgatgtgaaaaacgtacttggcctgacgttgccgcaaacgctggaacaatacgacgttatgctgacccaggatgacgcggtaaaaaatatgttccgcgcaggtcctgcaggcattcgtaccacacaggcattcagccaagattgccgttgggatacgctggacgacgatcgcgccaatggctgtatccgcagcctggaacacgcctacagcaaagacggcggcctggcggtgctctacggtaactttgcggaaaacggctgcatcgtgaaaacggcaggcgtcgatgacagcatcctcaaattcaccggcccggcgaaagtgtacgaaagccaggacgatgcggtagaagcgattctcggcggtaaagttgtcgccggagatgtggtagtaattcgctatgaaggcccgaaaggcggtccggggatgcaggaaatgctctacccaaccagcttcctgaaaagtatgggtctcggcaaagcctgtgcgctgatcaccgacggtcgtttctctggtggcacctctggtctttccatcggccacgtcagtccggaagcggcaagcggcggcagcattggcctgattgaagatggtgacctgatcgctatcgacatcccgaaccgtggcattcagttacaggtaagcgatgccgaactggcggcgcgtcgtgaagcgcaggacgctcgaggtgacaaagcctggacgccgaaaaatcgtgaacgtcaggtctcctttgccctgcgtgcttatgccagcctggcaaccagcgccgacaaaggcgcggtgcgcgataaaagcaaactggggggttaataatggctgacagccaacccctgtccggtgctccggaaggtgccgaatatttaagagcagtgctgcgcgcgccggtttacgaggcggcgcaggttacgccgctacaaaaaatggaaaaactgagcagccgtcttgataacgtcattctggtgaagcgcgaagatcgccagccagtgcacagctttaagctgcgcggcgcatacgccatgatggcgggcctgacggaagaacagaaagcgcacggcgtgatcactgcttctgcgggtaaccacgcgcagggcgtcgcgttttcttctgcgcggttaggcgtgaaggccctgatcgttatgccaaccgccaccgccgacatcaaagtcgacgcggtgcgcggcttcggcggcgaagtgctgctccacggcgcgaactttgatgaagcgaaagccaaagcgatcgaactgagtcagcagcaggggttcacctgggtgccgccgttcgaccatccgatggtgattgccgggcaaggcacgctggcgctggaactgctccagcaggacgcccatctcgaccgcgtatttgtgccagtcggcggcggcggtctggctgctggcgtggcggtgctgatcaaacaactgatgccgcaaatcaaagtgatcgccgtagaagcggaagactccgcctgcctgaaagcagcgctggatgcgggtcatccggttgatctgccgcgcgtagggctatttgctgaaggcgtagcggtaaaacgcatcggtgacgaaaccttccgtttatgccaggagtatctcgacgacatcatcaccgtcgatagcgatgcgatctgtgcggcgatgaaggatttattcgaagatgtgcgcgcggtggcggaaccctctggcgcgctggcgctggcgggaatgaaaaaatatatcgccctgcacaacattcgcggcgaacggctggcgcatattctttccggtgccaacgtgaacttccacggcctgcgctacgtcagtgaacgctgcgaactgggcgaacagcgtgaagcgttgttggcggtgaccattccggaagaaaaaggcagcttcctcaaattctgccaactgcttggcgggcgtagcgtcaccgagttcaactaccgttttgccgatgccaaaaacgcctgcatctttgtcggtgtgcgcctgagccgcggcctcgaagagcgcaaagaaattttgcagatgctcaacgacggcggctacagcgtggttgatctctccgacgacgaaatggcgaagctacacgtgcgctatatggtcggcggacgtccaagccatccgttgcaggaacgcctctacagcttcgaattcccggaaagtccgggcgcgctgctgcgcttcctcaacacgctgggtacgtactggaacatttctttgttccactatcgcagccatggcaccgactacgggcgcgtactggcggcgttcgaacttggcgaccatgaaccggatttcgaaacccggctgaatgagctgggctacgattgccacgacgaaaccaataacccggcgttcaggttctttttggcgggttaaggaaaaatgcctgatagcgcttcgcttatcaggcctacccgcgcgacaacgtcatttgtggttcggcaaaatcttccagaatgcctcaattagcggctcatgtagccgctttttctgcgcacacacgcccagctcaaacggcgttttctcatcgctgcgctctaaaatcatcacgcggttacgcaccggttcggggctgttttccagcaccacttccggcaacaatgccacgccacagccgagtgccaccatgcttaccatcgcttcatgcccgccaaccgtggcgtaaatcatcgggttactgattttattgcgtcgaaaccacagttcaatgcggcggcgtaccggcccctgatcggccataataaacggcaccgtactccagtccggcttctctacgctcacctgattacgcaccgggcagggcagcgcgggggcaatcagcactactgccagattctccagcatgctaaacgccactgcgccgggcaaggtttccggtttacccgcaatcgccagatccgcttcaccagtgaccaccttttccatcgcatctgccgcatcaccagtagtaagtttaatctccacgctcgggtgttccgcgcggaagcgatccagaatcggcggcagatggctgtaggcagcggtcacgctgcagaagatatgtaattcgccagagaggctcggcccttgctgatcgatggtgtggcgcaactgctgatactgcaacagcgtttgctgggcgaaaacgcgcagctcttcgcccgcttcagtcagcgtcaccgtgcggttatcgcgcacaaacagcggctgaccgagatcttcttccaggcgctgaatctgccgactgagcgtggatgggctaacgtgcatcgcccgcgcgctgcggccaaaatggcggctttccgccagatgcaggaaggttttcagatcgcgtaaatccacagggacagccctcgatgttgacgttgcaaaaattgcaatgtgacgttgtgaatatatcaatttccgcaataaatttcctgtcatatagtgaattcaatctcgcaaacgcgaaccgaacaataagaagcacaacatcacgaggaatcaccatggctaactacttcaatacactgaatctgcgccagcagctggcacagctgggcaaatgtcgctttatgggccgcgatgaattcgccgatggcgcgagctaccttcagggtaaaaaagtagtcatcgtcggctgtggcgcacagggtctgaaccagggcctgaacatgcgtgattctggtctcgatatctcctacgctctgcgtaaagaagcgattgccgagaagcgcgcgtcctggcgtaaagcgaccgaaaatggttttaaagtgggtacttacgaagaactgatcccacaggcggatctggtgattaacctgacgccggacaagcagcactctgatgtagtgcgcaccgtacagccactgatgaaagacggcgcggcgctgggctacagccacggtttcaacatcgtcgaagtgggcgagcagatccgtaaagatatcaccgtagtgatggttgcgccgaaatgcccaggcaccgaagtgcgtgaagagtacaaacgtgggttcggcgtaccgacgctgattgccgttcacccggaaaacgatccgaaaggcgaaggcatggcgattgccaaagcctgggcggctgcaaccggtggtcaccgtgcgggtgtgctggaaagctccttcgttgcggaagtgaaatctgacctgatgggcgagcaaaccatcctgtgcggtatgttgcaggctggctctctgctgtgcttcgacaagctggtggaagaaggtaccgatccagcatacgcagaaaaactgattcagttcggttgggaaaccatcaccgaagcactgaaacagggcggcatcaccctgatgatggaccgtctctctaacccggcgaaactgcgtgcttatgcgctttctgaacagctgaaagagatcatggcacccctgttccagaaacatatggacgacatcatctccggcgaattctcttccggtatgatggcggactgggccaacgatgataagaaactgctgacctggcgtgaagagaccggcaaaaccgcgtttgaaaccgcgccgcagtatgaaggcaaaatcggcgagcaggagtacttcgataaaggcgtactgatgattgcgatggtgaaagcgggcgttgaactggcgttcgaaaccatggtcgattccggcatcattgaagagtctgcatattatgaaagtctgcacgagctgccgctgattgccaacaccatcgcccgtaagcgtctgtacgaaatgaacgtggttatctctgataccgctgagtacggtaactatctgttctcttacgcttgtgtgccgttgctgaaaccgtttatggcagagctgcaaccgggcgacctgggtaaagctattccggaaggcgcggtagataacgggcaactgcgtgatgtgaacgaagcgattcgcagccatgcgattgagcaggtaggtaagaaactgcgcggctatatgacagatatgaaacgtattgctgttgcgggttaagtgcgcgctgatgccctcaccccgaccctctcccacagggagagggagaaaacactcaaggccttctcctggagaaggccttgctattagttgcggtacagcaccttaatgatgtgatatccgaactgggtgtgcagcgggccggtcggctccagtaccggacaagagaaaaccactttatcgaacgccggaaccatctgaccctggcggaattcacctaaatcaccgccgcgtttgccacttgggcaaatggagtgtttcttcgccagcttgccgaaatcggccccgttcttaatctgctcgagaagatccagagccagtttctcttcttttacaaggatatgcagtgctgctgctgtttttgccatgatcgtgccttgagtgaataattgtcaggcggcgattttagcatgatccgcagatgctaacgtaattgtcagtcagggagtggctggtacatatatggcaaaagcccggaaaatccgggcttcgcaggtccctcaaggggagaaaacttagggcctctatgggctacaaagtcattatcggggatggttattttattgtcaatttatgaggcttatggcattgatactcttgatgaccgccctctgtatgtctgcaaccaactcatgtggcaaacattgattaagataccctctgtaagtccttgctctgtttaatctgtttcgactgacttgttgtaccaggtcggctttggcccaacgaatctgctgatcaaagaattgcaggtcattgataacattactggctatttcaacatgcattccacgttttaacttgtctggtcggctgtggttgataatggaacgacgatgcatgcgttgccattaatttttccgttgagcacgacaactaacctgttttttatcatttcaggaggaatgcggccatcgtaatacgtcgtgctgaacggtccattttggctaacaggatagttaccaaagttgcattccagtatttcaccaaccttagggctgaaattaatcgccacgagtaaacctctccttagtaaactctgaaaaagtaataacacaacgttacgacccgatattttctaagtctaatggattcacgatgaactccgatttcggtcttctctctctgatttaaacatccgcagccaaccggttagcggcttacacgcggtcacattcaaatgcgattctgctacaatcctccccccgttcgaagattgagcaatacacctatgcgtctaaaccccggccaacaacaagctgtcgaattcgttaccggcccctgcctggtgctggcgggcgcgggttccggtaaaactcgtgttatcaccaataaaatcgcccatctgatccgcggttgcggttatcaggcgcggcacattgcggcggtgacctttactaataaagcagcgcgcgagatgaaagagcgtgtagggcagacgctggggcgcaaagaggcgcgtgggctgatgatctccactttccatacgttggggctggatatcatcaaacgcgagtatgcggcgcttgggatgaaagcgaacttcagcttgtttgacgataccgatcagcttgctttgcttaaagagttgaccgaggggctgattgaagatgacaaagttctcctgcaacaactgattagcaccatctctaactggaagaatgatctcaaaacaccgtcccaggcggcagcaagtgcgattggcgagcgggaccgtatttttgcccattgttatgggctgtatgatgcacacctgaaagcctgtaacgttctcgacttcgatgatctgattttattgccgacgttgctgctgcaacgcaatgaagaagtccgcaagcgctggcagaacaaaattcgctatctgctggtggatgagtatcaggacaccaacaccagccagtatgagctggtgaaactgctggtgggcagccgcgcgcgctttaccgtggtgggtgacgatgaccagagcatctactcctggcgcggtgcacgtccgcaaaacctggtgctgctgagtcaggattttccggcgctgaaggtgattaagcttgagcagaactatcgctcttccgggcgtattctgaaagcggcgaacatcctgatcgccaataacccgcacgtctttgaaaagcgtctgttctccgaactgggttatggcgcggagctaaaagtattaagcgcgaataacgaagaacatgaggctgagcgcgttactggcgagctgatcgcccatcacttcgtcaataaaacgcagtacaaagattacgccattctttatcgcggtaaccatcagagccgggtgtttgaaaaattcctgatgcaaaaccgcatcccgtacaaaatatctggtggtacgagctttttctctcgtcctgaaatcaaggacttgctggcttatctgcgcgtgctgactaacccggacgatgacagcgcatttctgcgtatcgttaacacgccgaagcgagagattggcccggctacgctgaaaaagctgggtgagtgggcgatgacgcgcaataaaagcatgtttaccgccagctttgatatgggcctgagtcagacgcttagcggacgtggttatgaagcattgacccgcttcactcactggttggcagaaatccagcgtctggcggagcgggagccgattgccgcggtgcgtgatctgatccatggcatggattatgaatcctggctgtacgaaacaagccccagcccgaaagccgccgaaatgcgcatgaagaacgtcaaccaactgtttagctggatgacggagatgctggaaggcagtgaactggatgagccgatgacgctcacccaggtggtgacgcgctttactttgcgcgacatgatggagcgtggtgagagtgaagaagagctggatcaggtgcaactgatgactctccacgcgagcaaagggctggagtttccttatgtctacatggtcggtatggaagaagggtttttgccgcaccagagcagcatcgatgaagataatatcgatgaggagcggcggctggcctatgtcggcattacccgcgcccagaaggaattgacctttacgctgtgtaaagaacgccgtcagtacggcgaactggtgcgcccggagccgagccgctttttgctggagctgccgcaggatgatctgatttgggaacaggagcgcaaagtggtcagcgccgaagaacggatgcagaaagggcaaagccatctggcgaatctgaaagcgatgatggcggcaaaacgagggaaataatcaaggccggaaaagatgcgtcagcatcgcatccggcacttactcattaatgcacttccagcggccagtggacatagctctgccactggctttcctgagcaataatctctttacccagcggatgttgggttagccaaccttgcggaagcgtcaaggtcaacagttcatggttagcctgtaatgtcatctctggcacgagatcgtcacggcgacggctggcaaaaatgatggccaggcgtagtaaacggcagagttgttctgcgacgcgcggcggtacggcattttgctgatgcaggctactgagatcgaccggattagtctggttgagcagtagcgtcgccagcaattttttctgtgcgggggtaaaaccgggaagatccagattacgcaccagataagcagcgtgttgcggcgcttgtttgaagtcaacgctcaggccgatttcatgaagctgacaggcgctgatgagcaaatcgcggcttattgcttcaagatgccattcgttttccacctgatcgaagaagttagccgcaactttggctacgcgctgtgcctgatcaatatcgatcataaagcggcgttgaatattacgcagcgtacggctgcgaatatcctgctcgacggccagatgcaacatgccgtagaccaggccttcacgcagcgcaccgcccgccagggtcatacactgaatattcagttcggtaaaaatggcgatcaggatcgccagaccactcgggaacactaacgcacgttccagcgtcagcccgtcaatctccagttcctccagccgaccgcaatgaatggctcgctgtttcaattgctgcaacttttccagggtaatgcgttcatccatcccctgtgccatcatgatttcctgtaacgcctgcacggtgccggaagcaccaacgcacactttccagccgtgataccgtaattcatcggcaaccggacgtaacacttcgcgtgccgctttttctgcagcatcaaaattttcctgccccagattacgatcggcaaaatagcgttccagccaggtgacgcagcccatgctcaggctgaacaagctggtggtttgtgcacccgtgccggttaccagttcagtactggctccgcctatatccaccaccaggcgctgatcggcaccaccagtggtgtgagcaacgccctgataaatcagacgtgcttcctcttcaccgctgatcacctgtaccggacaaccgagaatttcctgcgctttggcaataaaatcacccgcattgacggcaaggcgtaacgtcgccgtagcgacaacgcgaatttggctgggaggaatatcttgcagacgttcagcaaacaggcgcaaacattgccaaccgcgctccattgcttcattggagagggcattttcgctattcaggccagcagccagacgcactttgcgttttattcgcgtcagcgtctggatgcttccagccacctcgcgcacaaccagcatatgaaaactattgctaccgagatcaatggctgcatacaggctgctggtggaacccatactcttcatccttcaatctgtctctgtgttggctgcattctttcacctgaatcacttactacagtaagctcatcgggattcattctcttgccatcttgatacagtttgaatgattttgagtatgacattttttatttaaccactacgacgacgattacgcggagcgccagtacgacgcggaccattgcctgtgcgcgggcgcgtgaggcgcagcggttttggcagatcggtcatcaatgcgtccggattgtatttgcttaccggaatactgtgaccaatataggtctcaatagcaggcaaattcaatgcatactcttcacacgccaggctgatagagtgaccgcttgcgcctgcgcgacctgtacgaccaatacggtgaacgtaatcttcacagtcatcgggtaaatcgtagttaaagacgtgcgtcactgccggaatatgcaaaccacgcgcggcaacgtcggtggcaaccagaatatccagatcgccacgggtaaattcatcaagaatacgcagacgttttttctgcgcgacatcgcctgtcaataaaccgacacgatgaccatctgctgccaggtggccccagatctcttcacaacggtgtttggtgttggcgaaaataatcgctctgtctggccactcttcttcgatcagcgtttgcagcaaacgcattttttcttcgttagaagggtagaaaagctcttctttaatacggtggcccgttttctgttccggttccacttcaatatattcggcattgttcatctgctcgaacgccagttcacgtacccggtagctaagcgtggcggagaacagcatgttgaggcgctggtttgcaggcggcatacggcggaacagccagcggatatctttaataaagcccagatcgtacatgcgatcggcttcgtccagtaccaccacctgaatggcaccgaggttaatgtggttctgcttggcgtagtcaattaaacgccccgtggtgccaatcagaatgtcaacgccgctttccagcactttcagctgtttgtcgtagccatcaccaccgtaagccagacccagcttcaggccagtagcttccgccagcggttctgcgtcggcatggatctgcacggcaagttcacgcgtcggtgccataattaaggcacgcggctgattcaccttgcgatcggcaatcgcaggatgagagagaagataatgaaacgtactcgtaagaaacgccatcgttttcccggtaccggtttgcgcctgcccggctacgtcacgacccgccagcgtcagcggaagggccagtgcctgaatgggcgtacagttatgaaacccttttttttcaagggcttctacaaccttcggatgcagggcgaagtcggaaaacttctgttctgttaaatgtgttttgctcatagtgtggtagaatatcagcttactattgctttacgaaagcgtatccggtgaaataaagtcaacctttagttggttaatgttacaccaacaacgaaaccaacacgccaggcttattcctgtggagttatatatgagcgataaaattattcacctgactgacgacagttttgacacggatgtactcaaagcggacggggcgatcctcgtcgatttctgggcagagtggtgcggtccgtgcaaaatgatcgccccgattctggatgaaatcgctgacgaatatcagggcaaactgaccgttgcaaaactgaacatcgatcaaaaccctggcactgcgccgaaatatggcatccgtggtatcccgactctgctgctgttcaaaaacggtgaagtggcggcaaccaaagtgggtgcactgtctaaaggtcagttgaaagagttcctcgacgctaacctggcgtaagggaatttcatgttcgggtgccccgtcgctaaaaactggacgcccggcgtgagtcatgctaacttagtgttgacttcgtattaaacataccttattaagtttgaatcttgtaatttccaacgcttcccgttttatcttaaatgcgaagtgaacagatttctggcagcagtctcaatccgtcttgtcgtttcagttctgcgtactctcctgtgaccaggcagcgaaaagacatgagtcgatgaccgtaaacaggcatggatgatcctgccataccattcacaacattaagttcgagatttaccccaagtttaagaactcacaccactatgaatcttaccgaattaaagaatacgccggtttctgagctgatcactctcggcgaaaatatggggctggaaaacctggctcgtatgcgtaagcaggacattatttttgccatcctgaagcagcacgcaaagagtggcgaagatatctttggtgatggcgtactggagatattgcaggatggatttggtttcctccgttccgcagacagctcctacctcgccggtcctgatgacatctacgtttcccctagccaaatccgccgtttcaacctccgcactggtgataccatctctggtaagattcgcccgccgaaagaaggtgaacgctattttgcgctgctgaaagttaacgaagttaacttcgacaaacctgaaaacgcccgcaacaaaatcctctttgagaacttaaccccgctgcacgcaaactctcgtctgcgtatggaacgtggtaacggttctactgaagatttaactgctcgcgtactggatctggcaagtcctatcggtcgtggtcagcgtggtctgattgtggcaccgccgaaagccggtaaaaccatgctgctgcagaacattgctcagagcattgcttacaaccacccggattgtgtgctgatggttctgctgatcgacgaacgtccggaagaagtaaccgagatgcagcgtctggtaaaaggtgaagttgttgcttctacctttgacgaacccgcatctcgccacgttcaggttgcggaaatggtgatcgagaaggccaaacgcctggttgagcacaagaaagacgttatcattctgctcgactccatcactcgtctggcgcgcgcttacaacaccgttgttccggcgagtggtaaagtgttgaccggtggtgtggatgccaacgccctgcatcgtccgaaacgcttctttggtgcggcgcgtaacgtggaagagggcggcagcctgaccattatcgcgacggcgcttatcgataccggttctaaaatggacgaagttatctacgaagagtttaaaggtacaggcaacatggaactgcacctctctcgtaagatcgctgaaaaacgcgtcttcccggctatcgactacaaccgttctggtacccgtaaagaagagctgctcacgactcaggaagaactgcagaaaatgtggatcctgcgcaaaatcattcacccgatgggcgaaatcgatgcaatggaattcctcattaataaactggcaatgaccaagaccaatgacgatttcttcgaaatgatgaaacgcagttaaatttgtcttatgccaaaaacgccacgtgtttacgtggcgttttgcttttatatctgtaatcttaatgccgcgctggcgatgttaggaaaattcctggaatttgctggcatgttatgcaatttgcatatcaaatggttaatttttgcacaggactggtgggtttggaacggactttcccttctgaataaaggtcttcgtggttatacttctgctaataattttctctgagagcatgcattgtgaatttactgacagtgagtactgatctcatcagtatttttttattcacgacactgtttctgttttttgcccgtaaggtggcaaaaaaagtcggtttagtggataaaccaaacttccgcaaacgtcaccagggattgatacctctcgttggggggattagcgtttacgcagggatttgcttcacgttcggaattgtcgattactatattccgcatgcatctctctatctcgcttgtgccggtgtgcttgttttcattggcgcgctggatgaccgttttgatatcagcgtaaaaatccgtgccaccatacaggccgctgttggcattgttatgatggtgttcggcaagctttatctcagtagcctgggttatatctttggctcctgggagatggtgctcggaccgtttggttacttcctgacgctatttgccgtctgggcggccattaatgcgttcaacatggttgatggcattgatggcttgctgggcgggttgtcctgcgtcagctttgcagcaatcggtatgattttgtggttcgacgggcaaaccagcctcgcaatctggtgctttgcgatgatcgccgccatcctgccatacatcatgcttaaccttggtatcctgggtcgccgctacaaagtctttatgggtgatgcgggcagtacgctgattggttttaccgttatctggatcctgctcgaaacgacccagggcaaaacccatcccatcagcccggttaccgctttgtggataatcgccattccgctaatggatatggtggcgattatgtaccgtcgcctgcgtaaaggcatgagcccattctctcctgaccgtcagcatattcaccatttgatcatgcgtgccgggtttacttcccgtcaggcgtttgtgctgattacccttgccgcagcactgctcgcttccattggcgtgctggcagaatattctcattttgtcccggagtgggtcatgctggtgctctttttgctagcattcttcctctatggatattgcattaagcgtgcctggaaagttgctcgctttattaagcgcgtaaaacgcagactgcgtagaaatcgtggtggcagccccaatttaaccaaataaatgaggatgtgatgacacaaccaatgcctgggaaaccggccgaagacgctgaaaatgaactggatattcgtgggttgtttcgtaccttgtgggctgggaagctatggattattggcatggggctggcgtttgcgttaatcgcgctggcgtatacgttttttgctcgtcaggagtggagcagcacggcgattaccgatcgtccaacggtgaatatgctggggggatattacagccagcagcaatttttgcgtaacctggatgtccgtagtaacatggcttctgccgaccaaccaagcgtcatggacgaagcctataaagagtttgttatgcaactggccagctgggatacccgcagagagttctggctgcaaaccgactattacaaacagcggatggtgggcaacagcaaagccgatgcggcgttgctggatgaaatgattaacaacatccagtttatccccggagactttacccgcgcggtcaatgacagcgtgaagcttattgccgaaaccgcgcctgacgctaataacctgttacgtcagtatgttgcttttgccagccagcgtgcagccagccatctgaatgatgagctgaaaggcgcatgggcggcgcgtaccatccagatgaaagctcaggtgaagcgtcaggaagaggtggcgaaagccatctacgaccgccggatgaacagcattgagcaggcgctgaaaattgctgagcagcataatattagccgcagtgcgacagatgtacctgccgaggaattacctgatagtgaaatgttcctgcttgggcgtccaatgcttcaggctcgactggaaaatttacaggccgtcggtccggcctttgatctcgactatgatcagaatcgggccatgttaaacaccctgaatgttggtccaaccctggatccgcgttttcagacctatcgctatttgcgtacgccggaagaaccggtaaaacgcgatagcccacgtcgtgccttcctgatgattatgtggggcattgtcggggggctgatcggggctggtgtcgcattaacccgccgttgcagcaaataacaacactgctgcggtgagcgcaaaggcgctcgccgcttattcgaagagaatcgatgtgaaagtactgactgtatttggtacgcgcccggaagccatcaagatggcgccgttggtgcatgcgttggcaaaagatcctttttttgaggctaaagtttgcgtcactgcgcagcatcgggagatgctcgatcaggtgctgaaactcttttccattgtacctgactacgatctcaacataatgcagccaggacagggcctgacagagataacctgtcggattctggaagggctaaaacctattcttgccgagttcaaaccagacgtcgtgctggttcacggcgatacgacgacgacgctggcaaccagcctggcggcgttttatcagcgtattcctgttggtcacgttgaggctggtctgcgcacgggcgatctctatagcccgtggccggaagaggctaaccgtacattgaccgggcatctggcgatgtatcacttctctccaaccgaaacttcccggcaaaacttgctgcgtgaaaacgttgcggatagccgaatcttcattaccggtaatacagtcattgatgcactgttatgggtgcgtgaccaggtgatgagcagcgacaagctgcgtagtgaactggcggcaaattacccgtttatcgaccccgataaaaagatgattctggtgaccggtcacaggcgtgagagtttcggtcgtggctttgaagaaatctgccacgcgctggcagacatcgccaccacgcaccaggacatccagattgtctatccggtgcatctcaacccgaacgtcagagaaccggtcaatcgcattctggggcatgtgaaaaatgtcattctgatcgatccccaggagtatttaccgtttgtctggctgatgaaccacgcctggctgattttgaccgacagtggcggcattcaggaagaagcgcctagcctggggaaacctgtgctggtgatgcgcgataccactgagcgtccggaagcggtgacggcgggtacggtgcgtctggtaggcacggataagcagcgaattgtcgaggaagtgacgcgtcttttaaaagacgaaaacgaatatcaagctatgagccgcgcccataacccgtatggtgatggtcaggcatgctctcgcattctggaagcgttaaaaaataatcggataagtctatgagttttgcgaccatttctgttatcggactgggttatatcgggctgccaacggcagcagcgtttgccagtcggcaaaaacaggtaattggtgtcgatatcaaccaacatgcggttgataccatcaatcgtggcgaaatccatatcgtcgaacctgatttggcgagtgtagtaaaaactgccgtagaaggcggttttttacgagcgagcacgacgccagttgaagcggatgcctggctgattgctgtacccacgccgtttaagggcgatcatgagccagatatgacctacgttgaaagcgctgctcgctccattgcgccagtgctgaaaaaaggcgcgctggtgatccttgaatccaccagcccggtggggagtaccgagaagatggcagaatggttagcagagatgcgtccggatctcactttcccgcagcaggtgggcgagcaggcggacgtcaacattgcttactgcccggaacgcgtgttaccaggacaggtaatggtcgagctgattaaaaacgatcgcgtgattggtggtatgacgccggtttgtagcgcccgcgccagcgaactgtacaaaattttcctcgaaggtgagtgtgtcgtcactaacagccggacggcggaaatgtgtaagctcaccgaaaacagcttccgcgatgtgaatatcgcttttgctaatgaattgagcctgatttgtgccgatcaggggattaacgtctgggaactgattcgcctggcgaatcgtcaccctcgcgttaatattcttcagcctggccctggcgtgggcggtcactgcattgctgttgatccgtggtttatcgtggcacagaacccccagcaggcgcggcttatccgtaccgcgcgcgaagtgaacgatcacaaaccgttctgggttatcgatcaggtgaaagcggcggtggctgattgcctggcggctaccgataaacgcgccagtgaactgaaaatcgcctgctttggtctggcgtttaaaccgaatattgatgacctgcgcgaaagcccggcgatggaaatcgctgaactgatcgcccagtggcatagcggcgaaactctggttgttgagcctaacatccaccagttgccgaaaaaactgaccgggctttgtactctggcgcagcttgacgaggcgctggcaacggcagacgtgctggtgatgctggtcgatcatagtcagttcaaagttatcaatggcgacaatgtccatcagcagtatgtcgtcgatgccaaaggagtctggcgctgatgagaaaaattctgataacaggtggtgccgggtttattggcagcgcgctggtgcgttatatcatcaacgaaacgagcgacgcggtggtagtggtcgataagctgacctacgccggaaacctgatgagcctggcaccggtcgcgcaaagcgagcgctttgcctttgagaaagttgatatctgcgatcgggcagaactggcacgcgtattcactgagcatcagccagactgtgtcatgcatctggcagccgaaagccatgttgaccgttctattgacggcccggcagcgtttattgaaaccaacattgtcgggacttatacattgcttgaagcggcgcgggcttactggaatgcgctgacggaagataaaaaaagtgcgttccgttttcatcatatctccactgacgaagtatatggtgacctgcacagcacggatgatttcttcaccgaaaccacgccgtatgcgccgagcagcccttattccgcgagtaaagccagcagcgaccatctggtgcgcgcctggctgcggacctatggtctgccgacgcttatcaccaactgcagcaataactacggcccttaccactttccggaaaaactgatcccgctgatgatcctcaacgcgctggcgggtaaaagcctgccggtatatggcaacgggcagcaaatccgtgactggctgtatgtggaagatcacgcccgcgcgctgtattgcgtggcgaccaccgggaaagtcggtgaaacctataatattggtggtcacaacgagcgtaagaatctcgatgttgtggaaaccatttgcgagctgctggaagaactggctccgaacaagccgcacggcgtggcgcactatcgtgacctgatcacctttgtcgctgaccgtccggggcatgatctgcgttatgccattgatgctagcaaaattgcccgtgaacttggctggctgccgcaggaaacctttgaaagtggaatgcgtaaaacggttcagtggtatctggctaatgaaagctggtggaagcaggtgcaggacggcagctatcagggcgagcgtttaggtctgaaaggctaattttcagcggaggcaaacatgaaaggtattatcctggcgggcggttccggcacccgattgcatccgattacgcgcggcgtaagcaagcaactgttgccgatttacgataagccaatgatttactatccgctgagcgtgctgatgctggccggtatccgcgaaattctcatcatcactacgccggaagataaaggttatttccagcgcctgctgggcgatggtagtgagttcggtatccagctggaatatgccgaacagcccagcccggacggtctggcgcaggcctttatcatcggtgaaaccttccttaatggtgaaccttcttgtctggtgctgggcgataacatcttcttcggtcagggcttcagtccgaagctgcgtcatgttgcggcgcgcaccgaaggggcgacggtttttggctatcaggtgatggacccggaacgctttggcgtggtggagtttgacgacaatttccgcgctatcagcctggaagaaaagccaaaacagccgaagagtaactgggcggtgaccgggctttatttctacgacagtaaagtcgtggagtacgcaaagcaggtgaagccgagcgagcgtggtgaactggagattacctccatcaaccagatgtacctcgaggcgggcaacctgaccgttgaactgctcgggcgcggatttgcctggctggataccggcactcacgacagcctgattgaagccagcacctttgtacagacggtggaaaaacgccagggctttaagattgcctgcctggaagagattgcctggcgtaacggctggctcgatgacgagggtgtgaagcgtgctgccagtagtttagcgaaaactggctacggccaatatctgctggagttacttcgtgcccgtccgcgccagtattgagccactaacctgggaaaacgccttctttggtgttaacagcgccatcgtgcgcattacgtctgaagcaccgctcctgacgccagacgcgttagcgccgtggtcacgggtgcaggccaaaattgcggcaagtaatacgggtgaactggatgccctgcaacagctgggattctccctggtagaaggtgaagttgatttggcgctacccgtgaacaatgccagtgatagcggtgctgtagtggcacaagagaccgatattcccgcattacgtcagttagccagcgccgcatttgcgcaaagccgttttcgtgcgccgtggtatgcgcctgacgccagcagtcgcttttatgcacagtggattgaaaatgccgtgcgcggcacctttgatcatcaatgtctgattttacgtgcggcgtccggcgatattcgcggctatgtctctttacgggaactcaatgcgacagatgcgcgaattggcctgctggctggacgcggtgcaggtgctgagctgatgcaaacggcgctaaactgggcgtatgctcgcggtaaaacaactttgcgggtggcgacccaaatgggcaacaccgccgcgcttaaacgatacatacaaagtggtgcgaatgtagaaagcaccgcgtactggttatacaggtgatcacatgattccatttaacgcaccgccggtggtgggaaccgaactcgactatatgcagagcgcaatgggtagcggcaaactgtgtggcgatggcggttttacccgtcgctgccagcagtggctggagcaacgttttggcagcgccaaagtgttactgacgccgtcctgcaccgctagcctggagatggcggcgctgctgctcgatatccagcctggcgatgaagtgatcatgccgagctacacctttgtctccaccgccaatgcctttgtgctgcgtggcgcaaaaatcgtttttgtggatgttcgcccggacaccatgaacatcgacgaaacgctgattgaagcggcgatcaccgacaaaacgcgcgttatcgtgccggtccattacgcgggtgtggcctgcgaaatggacaccattatggcgttggcgaaaaagcataatttgtttgtggtagaagatgccgctcagggcgtgatgtccacttacaaagggcgtgcactgggaaccattggtcatattggctgctttagcttccatgaaaccaaaaactacacggcgggcggtgaaggcggcgcgacgctgattaacgataaagcgttaatcgaacgagccgagatcatccgtgaaaagggcactaaccgcagccagttcttccgtggtcaggtcgataaatatacctggcgcgatattggctccagctatttgatgtccgatctgcaagctgcatacctgtgggcgcaactggaagcagcggatcgtatcaaccagcaacgtctggcgctgtggcaaaactactacgatgcgttagcgcctctggcgaaagccgggcgtatcgagctgccgagcattcccgatggctgcgtgcagaacgcgcatatgttctacattaaactgcgggatattgatgaccggagcgcgttgattaactttctgaaagaagcggaaatcatggcggtgtttcattacattccgctgcacggttgccctgcgggggaacactttggtgagttccacggtgaagatcgctacaccaccaaagagagcgagcgcctgctgcgcctgccgctgttctacaacctgagccccgtcaatcagcgtacggtaattgcgactttgttgaactacttttcctgatatgagcttggcaaaagcgtccttgtggacggcggccagtacactggtcaagattggtgccgggttactggtcggtaagttgctggcggtgagttttggtccggcggggcttgggctggcggcaaatttccgccagttgattaccgtgctcggcgtgcttgccggggctggcatctttaacggtgtaaccaaatacgttgcccagtaccatgataatccgcaacagctgcgccgcgtggtcggcactagtagtgcgatggtacttggtttctctacgctgatggcgctggtttttgtgctggcagctgcgccaatcagccagggattgtttggtaataccgactatcaggggctggtgcgtttagtggcgctggtgcaaatggggatcgcctggggcaacctgttactggcgctgatgaaaggctttcgcgatgccgcaggtaatgcgttaagcctgattgtcggcagcttgattggcgttctcgcgtactacgtcagttaccgtttgggcggttatgaaggggcgttgctgggtctggcgctgattcccgcgctggtggtaattcctgccgccatcatgttgatcaaacgtggtgtcatcccgttaagctatctgaaacccagctgggataacggtctggcagggcagttgagcaaatttacgctcatggcgttgattacgagcgtgaccttgcctgttgcttacatcatgatgcgtaaactgctggcggcgcagtatagctgggatgaggtggggatctggcaaggggtgagcagtatttccgatgcctacctgcaatttattacggcaagcttcagcgtatatttgctgcccacgttgagccggctaacggaaaagcgcgatatcacccgggaagtggttaaaagcctgaaattcgtcttaccggcagtggcggcggcgagttttaccgtctggctgctgcgtgattttgctatctggctgctgttgagcaataaatttaccgctatgcgcgatctctttgcctggcagttagtgggtgatgtgttaaaagtgggcgcttatgtctttggttatctggtgatcgccaaagcgagtctgcggttttatattctggcggaagtcagccagttcactttattgatggtatttgcccactggctaatccctgcgcatggtgcactgggcgcggcgcaggcatatatggcaacttatatcgtctatttttctctttgttgtggcgtgtttttactctggcgtaggcgggcatgactgtactgattcacgtactgggaagcgatatccctcaccataaccgaaccgttttgcggtttttcaatgacgcgctggccgcgacgagcgagcacgcgcgcgagtttatggttgttggcaaggacgacggcttaagtgatagctgtccggcgctttctgtgcaatttttccctgggaaaaaaagcctggcggaagcggtcatcgcgaaagcaaaagctaaccgtcagcagcgttttttcttccacggtcagttcaatcccacactgtggctggctctgctgagtggtggcattaagcccagccagtttttctggcatatctggggggcagacctgtatgagctttccagtggcttgagatataagcttttttacccactacgtcgcctggcgcaaaagcgagtcggctgtgtatttgccacccgcggcgatttgagcttttttgccaaaacgcacccaaaggtgcggggcgaactgctgttcttcccgacgcggatggaccctagcctcaatacgatggcgaacgatcggcaacgtgaagggaaaatgaccattctggtggggaactccggcgaccgcagcaatgagcatattgctgccttgcgcgccgttcatcagcaatttggcgatacggtaaaagtggtggtgccgatgggatatccgcctaataacgaagcgtacattgaggaagttcgtcaggcggggctggagttattcagcgaagaaaatctacaaattctgagcgaaaaactggaatttgacgcctatctggcgctacttcgtcagtgcgatcttggttactttatttttgcccgccagcagggcattggtacgctgtgcttactgattcaggcgggcattccttgtgtgcttaaccgggaaaatccgttctggcaggatatgacggaacaacatttgccggtgctgtttactaccgacgatctcaacgaggatattgtgcgtgaagcgcagcgccagttggcgagcgtggataaaaacaccattgccttctttagccctaactatctacaaggctggcagcgggcgttggcgattgccgccagggaggtcgcatgagtctgctgcaattcagtggcctgtttgttgtctggctgctctgcacgctgtttattgccacgctgacctggtttgagtttcgccgtgtgcgctttaacttcaatgtcttctttagtttgctgtttttgctcacctttttcttcggcttcccgctgaccagcgtgctggtatttcgctttgatgttggtgtcgcgccgccagaaatcttgttgcaggcgttgctttctgcgggctgcttctacgcggtttactatgtcacctacaaaacccgcctacgcaaacgcgttgctgatgtaccgcgccgtccgctgtttaccatgaaccgcgtggagaccaatcttacgtgggtgatcctgatgggtatcgcgctggtaagcgtcggcatcttcttcatgcacaacggctttttgctgttccggcttaactcctacagtcagatcttttccagtgaagtctccggcgtggcgttaaaacgcttcttttactttttcatcccggcgatgctggtggtctactttctgcgccaggacagcaaagcgtggctgtttttcctcgtcagcacggtcgcctttggcttgctgacttatatgattgtcggcggcactcgcgccaatatcatcatcgcattcgctatcttcctgtttattggcattattcgcggctggattagcttgtggatgctggcggcggcgggcgtgctggggattgttggcatgttctggctggcactaaaacgctatggaatgaatgtgagcggcgatgaagcgttctatacgtttctctatctcactcgcgacaccttcagcccgtgggagaatctggcgttgctgttgcagaactacgacaacatcgacttccagggcctggctccaattgtccgcgatttctatgtctttatcccttcctggctgtggccgggtcgcccgagtatggtgctgaacagtgccaactactttacctgggaagtgctgaataaccactccggactggcgatcagccctacgcttataggcagtctggtggtgatgggcggcgcgttgttcatcccgctcggggcgatcgtggttggtctgatcatcaaatggttcgactggctgtatgagctgggcaaccgcgagcctaatcgctataaagctgcgatattgcacagtttctgctttggggcgatcttcaatatgatcgtgctggcgcgtgaagggctggatagctttgtcagtcgcgtggtcttttttatcgtggtcttcggcgcatgtctgatgatcgcaaaactgttgtactggctttttgaaagcgccggactcattcataaacgtacaaaaagtagcctccggacgcaggttgaaggataacaatgaataacaacaccacggcaccaacctatacgctgcgtggcttacagttgattggttggcgtgatatgcagcacgccctcgattatctgtttgctgacgggcagcttaagcagggaacgctggttgccattaatgctgaaaaaatgctgactattgaagataacgccgaggtcagggagttaattaacgctgccgaatttaaatatgcggatggcatcagcgttgtacgtagtgtacgtaaaaagtacccgcaggcgcaggtttcccgcgttgccggtgccgatctctgggaagagctgatggcgcgcgcaggcaaagaagggacgccggtatttcttgtgggcggtaaacctgaagtgctggcgcaaactgaagctaaactgcgcaaccagtggaatgtgaatatcgttggcagtcaggatggttattttaaacccgagcagcgtcaggcgctgtttgaacgcattcatgccagcggtgcgcaaatcgtcaccgttgcgatgggaagcccaaagcaggagatcatcatgcgcgactgccgtctggtacatccagatgcgctgtatatgggcgttggcgggacttacgatgttttcaccggtcacgtaaaacgcgcaccgaaaatctggcaaacgctggggctggagtggctctaccgcctgcttagccagccgagccgcattaagcgtcagcttcgtttgctgcgttatttacgctggcactacaccggcaacctatgattttcctctctttgtaaagcgacggagtggtcactccgtcgcctgtctgcttttttattacacaaagcattcaaatttttaatgctttatttgccatttctcctgaattacgaaaacatttgcaacactcgatgtacccataacgataaccggtaacaccggaaagcatgcaaacacaacacgaggatttatggcagataacaaaccagagctacagcgtgggctggaagctcgacatatcgaactcatcgccctggggggcaccattggcgtcggcctgtttatgggggccgccagtaccctgaaatgggccgggccatccgtattgttggcctatatcatcgccgggctgttcgtctttttcatcatgcgtagtatgggcgaaatgttgttcctcgaaccggttaccggtagcttcgccgtttatgcgcatcgttatatgagcccgttctttggctatctcaccgcctggtcttactggtttatgtggatggcggtggggatctctgaaatcaccgccattggcgtttatgtccagttctggttcccggagatggcgcagtggatacccgcattgatcgcagtggcgctggtggcgttggcgaatctggcggcggtgcggttgtacggcgaaatcgagttctggttcgcgatgatcaaagtcaccacgattatcgtgatgattgtcattggcctgggcgtgattttctttggctttggcaatggcgggcagagcattggttttagcaatctcacagagcatggcggtttctttgcgggtggctggaaagggttcctgaccgctctgtgtattgtggtggcgtcctaccagggcgtggagctgattggcattactgccggtgaagcgaagaatccgcaggtgacgctgcgcagtgccgtaggcaaggtgctgtggcggatcctgattttctacgtaggcgcgattttcgttatcgtcaccatcttcccgtggaatgaaataggcagcaacggcagcccgttcgtactgacttttgccaaaatcggtattaccgcagcggcgggcattatcaactttgtggtgctgacggctgcgctctctggctgtaacagcggcatgtacagttgcggacgtatgctctacgcactggcgaaaaaccgtcagttaccggcggcaatggcgaaagtttcccgtcacggcgtaccggttgcgggtgtggcagtatctattgctattctgctaattggcagttgcctgaactacatcattcccaatccgcagcgtgtgtttgtctacgtctacagtgccagcgtgcttccggggatggtgccatggtttgtgatattgataagccagctgcgttttcggcgtgcacataaagcggcgattgccagccatccgttccgcagtatcctgttcccgtgggccaattacgtaacaatggcattcctgatttgcgttttgatcggcatgtactttaatgaagatacgcgtatgagcctgtttgttggcatcatctttatgctggcggtgacggcgatttataaagtttttggccttaatcgccacgggaaagcgcataaactggaggaataagcagcaaaacgcacaaaccgtaaccaaacgcgcaatttatttaaaaagggactagacagaggggtgggaagtccgtattatccacccccgcaacggcgctaagcgcccgtagctcagctggatagagcgctgccctccggaggcagaggtctcaggttcgaatcctgtcgggcgcgccatttagtcccggcgcttgagctgcggtggtagtaataccgcgtaacaagatttgtagtggtggctatagctcagttggtagagccctggattgtgattccagttgtcgtgggttcgaatcccattagccaccccattattagaagttgtgacaatgcgaaggtggcggaattggtagacgcgctagcttcaggtgttagtgtccttacggacgtgggggttcaagtcccccccctcgcaccacgactttaaagaattgaactaaaaattcaaaaagcagtatttcggcgagtagcgcagcttggtagcgcaactggtttgggaccagtgggtcggaggttcgaatcctctctcgccgaccaattttgaaccccgcttcggcggggttttttgttttctgtgcatttcgtcaccctcccttcgcaataaacgcccgtaataactcattgccccacggtatgatttcgcccttaacgtattgaaggatgacttcaggcaaggagcgaccatgctgcaacaggttccaacgcgtgcttttcatgtgatggcgaaaccgagcggttccgattgtaatctgaactgtgactactgtttttatctcgaaaaacaatccctttaccgcgaaaagccagtcacgcatatggacgatgacacgctggaagcgtatgtccgtcactatatcgctgccagcgaaccgcaaaacgaagtggcttttacctggcagggcggcgaaccaacgctactcgggctggcgttttaccgccgtgccgtagcgctacaggcgaaatatggtgctggcaggaagataagtaacagcttccagactaacggcgtgctgctggatgacgaatggtgcgcgtttctcgcggagcatcattttcttgttggtttaagcctggatggcccgcctgagatccacaatcaatatcgcgtgactaaaggtggcagacccacgcataagctggtgatgcgtgccctgacgctcctgcaaaaacatcatgtcgactataacgtgctggtctgcgttaatcgcaccagcgcgcagcaaccgttgcaggtatatgattttttgtgcgatgcgggagtcgaattcatccagtttattccggtggtcgagcgcctggctgatgaaacaactgcccgcgatggacttaagttacatgcgcctggtgatattcagggtgagctaacggaatggagcgtgcgccccgaggagttcggtgagtttctggtggcgatattcgaccactggatcaaacgcgacgtcggcaagattttcgtgatgaatatcgaatgggcgtttgccaattttgtcggtgcgccgggtgcggtttgccatcatcagccaacctgtgggcgcagcgtgattgttgagcacaacggcgacgtttacgcctgtgatcactatgtttatccgcaatatcggctggggaatatgcaccagcaaacaattgcagaaatgatcgattccccgcaacagcaggcgtttggtgaagataaatttaagcagttaccggcgcagtgtcgcagttgtaacgtgttaaaagcgtgctggggaggctgcccgaaacaccgcttcatgctcgatgccagcggcaaaccgggactgaattatttgtgtgccgggtatcagcgttatttccgccatctaccgccatatcttaaagcaatggctgatttgctggcgcacggtcgcccggccagcgacattatgcatgcgcatttgctggtggtgagtaagtaaaaatcggcggccgcctgcggttgattgccggatgcggcgtaaacgccttatccggcctacatgatcgtgcaaattcaataaattgcagcgttctgtaggctggataagatgcgtcagcatcgcatccggcaaaggcagatctcagcgatagcgccggcttagtcagatttaatctgcgcgcgtggtggatattttttcaggatctccatatacgcgtgcatttcggtctgtagcggtacacccatcggaatatggcgcacgccgatggagtcgctttcctgcggatcggtgtagaggttaaacacgctgcttcccgccgtttgcattactgtgccggtgaatccaccctgatatccgctctgggtataagcgtaaggttgctgaatcaggacgtgatacttgaactcatccatacgcacagcagcgagtttaccgttgaggaagtagtgctcggccttacggttagactgaccatttgttcccaggaagaaggatgtctggtccacaccatcgataaaggtggttttcggcactaaattcgccactttcgctccaggatgccctgccagatccagcgcggtagggaagagatctgccagatcgacaataccgtcagatttacgcggttggatcatccctttccagtaaacgaaagtcggtacgcgaacgccgccttcccaggtgctacctttcgcaccacggaacggggtgcgtccgtgcggcggtacttcggcttccggtccgttatcggaggtaaagacgatcagcgtgttatcaagctgaccgtttttctccagtgttttatacagattagcgaacacatcgttcatctccaccatgcagtcgccatagctggtgcgtgccggagagctacccgcatatttcgcatttgggtagttatcgaagtggcagccacgagtgccgtagtagaggaagaatggtttatcgctcttcgccatcttgtcgaggaacttaacgccatagtccatccagcgttgatccagatcttccatatatttcggcgtaatgtcggcaatggcctgttgttcgccgccgcgcaccgcatgaacgtcatctttgctgaacggtaattgcttgatgtattcagaacggtccggactcagggccacttccggattgacgtgaacgtcgcgccattcggtgtacatatcagacacgctgttaaagccacggaaatcatcaaagccaacgttctgcggctggctctctttgttttcccccatatgccattttccgatggcctgagtgacgtagccctgatcgtgcagcaactgcggcagcgtggttaacccttgcagcccgcccggttgcccgtacattggcggcatcagaatgccgtggtggatggagtattgtccggtgagaatggtggcgcgggttggggaagagcttggttgagaatacgcgctagttaaaatcagcccctggctggcaacggcgtcgatatctggtgtagggttacccaccgccacgccgccaccgttaaaaccgacgtccatccagcccacatcgtccagcaagaaaacaaccacattcggtttcttaccggtttttttctcaagttctgccagcttctgctgggtttctttatcctgcgccggatgctgcattactggcatcatattgtcggcaatagtggtcgccggtttaaccagatactggtttgggtgatcgtatccggcaaagcctttgcgtgcggtggcagtactcggggtatctgctgcgctggccatgagaggaagagcggcggcgacagcaacaacaagacgtttgggactaaagctaaattccatgcaaaatgctccggtttcatgtcatcaaaatgatgacgtaattaagcattgataattgagatccctctccctgacaggatgattacataaataatagtgacaaaaataaattatttatttatccagaaaatgaattggaaaatcaggagagcgttttcaatcctacctctggcgcagttgatatgtaaggcaggtttattatatcgcgttgattattgatgctgtttttagttttaacggcaattaatatatgtgttattaattgaatgaattttatcattcataataagtatgtgtaggatcaagctcaggttaaatattcactcaggaagttattactcaggaagcaaagaggattacagaattatctcataacaagtgttaagggatgttatttcccgattctctgtggcataataaacgagtagatgctcattccatctcttatgttcgccttagtgcctcataaactccggaatgacgcagagccgtttacggtgcttatcgtccactgacagatgtcgcttatgcctcatcagacaccatggacacaacgttgagtgaagcacccacttgttgtcatacagacctgttttaacgcctgctccgtaataagagcaggcgtttttttatgtatcaggaaggccccggaggtgcttgcctccgggtgagaaggaattactgtggcgggttattctgcaacgttaacatcaaaccgtcgcgacgcatagctgcagcttcttccggcttgtgcagtctgtccagcgcgtcggcaagccatgcgtaatcgtaggcgtccggacgttgtttcagcgctgcgcggaaggcgaggcttgcttcctgccattctccgtgcttcatcagactctggcccagtgtgctccacaacagcgggcgatcgccgacgtttttgatttgctggcgcagcactttttccagctgttccggattgtttgttttcagtcgaggaatcggcagcagtaggcgatcgtcgtactggcgtttcaggccatcgatgataatttgctgggcagtatcatgatcgtcacattcaataagatgttccgccattgccacctgcaacgctacctgatgacgcgttttccggctttggtttttccaccagttacgcaaaccttcgctaccgttatcggcacgcgcctgatccatcaggccaatccatgcctgttgttccagcattgcacgatgttcttcatcaccaacatgggctttcgccatacttgggataatatccagcaggctactccatgcacctgtgcggatatacgcctgttccgccagacgtaatacttccggatggcgtggcgtaacttccagcagcttatccacgccgtggcgtgcagcatggttttcattacgggccagttgcagacgtacgcgggtgatttctaccggaatggtgtcgttgccggccagctccgctgcgcgttccagatgttggttggcgcgtgcttcatcaccacgttgttgcgcggcttcggcagccagtagatagttcaccaccggttgttccgcgtgatcggcatttttcgccatcagcttttcaacttgctgataatcgccttccgccagtttcagcagcgcctgttcggtctgcttacgtgcacggcgacgcttacgtccgacaaaccacccacgggtgtgcgcgccagtgcggaagatccgccgcagtagccactcaatggcaaacagcactaccatcgccagaatcaatatgatcgccaggcccgtgacgctggtttcgatattgtagttgtcggtctggatcagcacataaccctgatggccggcaatcatcgggccaaccacgatccccgcaatcagcaacacaaagagcaataacacttttagcatggttattctccttgcggcgcggctgccggagtatcagcttgcggtgcaggtgcaggtttagcttccgttgtccccgctgccggttgtgccagcaggttacgcacgcgagtctgcatcagtttttccagcatcgcctggctttgcagggtttccggaagatccatgctgatattttgctggcttaactggtccacctcgtcgaggaacgctttggtggtggcatcatcagtatcgtagtaagcacgtacccaggtggagacgttctccagcgcctggcgataagtctcttcctggtgacgcggtacagcttgtgctgcgaccagcaggcgagagcgaatattttcgcgcagatagatatcctgatttggcgctaacagcggtacggcggtgtcatcacgacggcgaatcgtaatgaagttgtccataaagttctgccagcttttttgcagattgatacgccattcgctgatggaactggaaagctcttcaccgtcactatccatcgggctaccatcgctgtcattatcggccagacgcaggttatctacctgattactaagctgattaagcttaaggatgatgccgtcataatccacctggcttactgcagaaaggctggcgatatcatcggtaattgcccgacgaacggtaatcagactcgggtcattcatatccgccaggctggcgtctgcacttttcagcaacgctgcagcggtcgtgacgtcctgatcgctccacagcttccgtccggcgagtttcaccagaaaatcggcctgagccagcagccaggttttagcatcgctgccggaaatggtggcgaccttttgttggacttcatccaactgttttgccagcgtttcttgctgacgattcgcctgcttaagttgtgcagcttgttgcttaataatgccttccagctcggctttttggctctcctgggctttttgcaatgccgtcagttggttagccagggcatcgctggtggcggtctgattgacggcctgttgtttaccccagccatacaaaccgatgcccgccgccagagcaatagcgatagccaccgcgctgagaatcaatgcggtattgttcttactctttttttctgttgcgacaggttgactcgtggtgtccacggcctccctggtctcttcaaccacggcggaggttttttcttgttccgtcattatggcttcctgttatgagagttattgtaatgcccgtaaaagcgcatcgttgtcagcgttatcggcgaccttaatgtcttgccagcccagttcccgggcgagtttcgccaaacgctcactgacgaccaatagtcgacagtgtagtaaccagtgctcacgataccattgtgggatcaggctccagagttgctgcaacatttcaccgctggtaacaacgaccatcgtcacctcgcgggcttgccagcgcatcgcttcttctgcaccatcgtaatggattgcgcatcgttgataacattcacaaaaagtgacctcagcaccgcgcgccgtcagggtatccccaattagctcacgaccaccattgccacgtaatatcagcgcacgtttgcccgcaatattttgtaattcaggtaattgtagcaagacttcgctgatttcccgatcctgcgggtagagaatcttctgtccacttacggtatgtagtgccagtgcggtggtgcgtccaatggcgaaataatcaggtagtcggggccatttacgatcttgctgatgcagctgactttgggcaaaagcaaccgcgtgttggctgagggcaaacaacagatcgctctcccccagcgctgccagttgatcagcaagttgcggtaattgttgacccggagaaaactcaatcagcggaaaatgccaggccacctgccccagtgtgcgcagacggctcactaactcttctccagcgggagacgggcgggtgacaaggatactcatgccggggcgtctccgttatagacttcagcgaggatctcgcgcgcgccgttattcagtagctcttctgccaggctaatccccatttgttcggcatcttgcggcgcaccgcggcgttcaccgcgaataatctggctaccgtccggcgcgccgaccagcgcacgcagccagatttcgccatcaataagctcggcgtagctaccaattggcacctgacatccgccttcgagacgggtattcatggcgcgttctgcggtaacgcgcagtgcagtttcgtggtgattcagcgcggcaagcagctcgcgagtgcgactatcatcaaggcggcattcaatacccaccgcaccttgtcctaccgccggaagagaaatctcgggtggcaacgcggcgcgaatacgactctccagacctaaacgttttagtccggctacggcaagaatgatggcatcgtattcgccgttatccagtttgctcaggcgagtgccgacgttgccgcgcagggagcggataatcagatccggacggcgttcagccagttggcactggcgacgtaaactggacgtcccgacgatactgcctgccggtaacgcatccagactgtcatagttattggacacaaaggcatcgcgaggatcttcacgctcacaaatagtgaccagtcccagaccttgcgggaattcaaccggcacatctttcatactgtgtacggcgatatcggcgcgattttcgaggagcgcgacttccagctcttttacaaataagccttttccgcctactttcgccagcggcgtatcaagaatcacatcgccgcgcgtcaccatcggtaccagttcaacgaccaggcccggatggctcgccatcaacttgtctttgacatagtgtgcctgccagagtgcaagtgggctttggcgtgtggcaattcttaaaacattgtctaacatgcttgttaccgtcattatcatccgtggtccatcctaacatccttgccagagtgatgtcagtgttgtggtgaaacgtagacgcctgcgcaaaccgtaaaatgaggtctggcagtggatcctgacaggcgtttcacgccgttgtaataaggaatttacagagaataaacggtgctacacttgtatgtagcgcatctttctttacggtcaatcagcaaggtgttaaattgatcacgttttagaccattttttcgtcgtgaaactaaaaaaaccaggcgcgaaaagtggtaacggttacctttgacatacgaaatatcccgaatgccgcgtgttaccgttgatgttggcggaatcacagtcatgacgggtagcaaatcaggcgatacgtcttgtacctctatattgagactctgaaacagagactggatgccataaatcaattgcgtgtggatcgcgcgcttgctgctatggggcctgcattccaacaggtctacagtctactgccgacattgttgcactatcaccatccgctaatgccgggttaccttgatggtaacgttcccaaaggcatttgcctttacacgcctgatgaaactcaacgccactacctgaacgagcttgaactgtatcgtggaatgagtgtacaggatccgccgaaaggtgagcttccaattactggtgtatacaccatgggcagcaccagctccgtagggcaaagttgttcctctgacctggatatctgggtctgtcatcaatcctggctcgatagcgaagagcgccaattgctacaacgtaaatgtagcctgctggaaaactgggccgccagcctgggtgtggaagtcagcttcttcctgattgatgaaaaccgcttccgtcataatgaaagcggcagcctggggggcgaagattgtggctccacccagcatatactgctgcttgacgaattttatcgtaccgccgtgcgtctcgccggtaagcgtattctgtggaatatggtgccgtgcgacgaagaagagcattacgacgactatgtgatgacgctttacgcgcagggcgtgctgacgccaaatgaatggctggatctcggtggcttaagcagcctttctgctgaagagtactttggtgccagcctttggcagctctacaagagtatcgattccccatacaaagcggtactgaaaacactgctgctggaagcctattcctgggaatacccgaacccacgtctgctggcgaaagatatcaaacagcgtttgcacgacggcgagattgtaagctttggtctcgatccatactgcatgatgctggagcgtgttactgaatacctgacggcgattgaagattttacccgtctggatttagtacgtcgctgcttctatttaaaagtgtgcgaaaagctcagccgtgaacgcgcctgcgtaggctggcgtcgcgcagtgttgagccagttagtgagcgagtggggttgggacgaagctcgtctggcaatgctcgataaccgcgctaactggaagattgatcaggtgcgtgaggcgcacaacgagttgctcgacgcgatgatgcagagctaccgtaatctgatccgctttgcgcgtcgcaataaccttagcgtctccgccagtccgcaggatatcggcgtgctgacgcgtaagctgtatgccgcgtttgaagcattaccaggtaaagtgacgctggtaaacccgcagattagtcccgatctcagcgaaccgaatctgacctttatttatgtgccgccgggccgggctaaccgtagtggttggtatctgtataaccgcgcgccaaatattgagagcatcatcagccatcagccgctggaatataaccgttacctgaataaactggtggcgtgggcatggtttaacggcctgctgaccagccgcacccgtttgtatattaaaggtaacggcattgtcgatttgcctaagttgcaggagatggtcgccgacgtgagccaccatttcccgctgcgcttacctgcaccgacaccgaaggcgctctacagcccgtgtgagatccgccatctggcgattatcgttaacctggaatatgacccgacagcggcgttccgcaatcaggtggtgcatttcgatttccgtaagctggatgtcttcagctttggcgagaatcaaaattgcctggtaggtagcgttgacctgctgtaccgcaacagctggaacgaagtgcgtacgctgcacttcaacggcgagcaaagcatgatcgaagccctgaaaactattctcggcaaaatgcatcaggacgccgcaccgccagatagcgtggaagtcttctgttatagccagcatctgcgcggcttaattcgtactcgcgtgcagcaactggtttctgagtgtattgaattgcgtctttccagcacccgccaggaaaccgggcgtttcaaggcgctgcgcgtttctggtcaaacctgggggttgttcttcgaacgcctgaatgtaagcgtacagaaactggaaaacgccatcgagttttatggcgcgattagccataacaaactgcacggcctgagtgtgcaggttgaaaccaatcacgtcaaattaccggcggtggtggacggctttgccagcgaagggatcatccagttctttttcgaagaaacgcaagacgagaatggctttaatatctacattctcgacgaaagcaaccgggttgaggtatatcaccactgcgaaggcagcaaagaggagctggtacgtgacgtcagtcgcttctacagcagtagccatgaccgttttacctacggcagtagcttcatcaacttcaacctgccgcagttctatcagattgtgaaggttgatggtcgtgaacaggtgattccgttccgcacaaaatctatcggtaacatgccgcctgccaatcaggatcacgatacgccgctattacagcaatattttagctgatgaacgtgccggaaagcgaggcttatccggcatgcaatcttagcggaaactgactgtttcacccgcctgctgcgtcgccgcctgttccagcaaatcccagaaggtttcgccgctgcgatcacaaatccactcatcgcctttcaggtcaaaatggtagccgccctgtttggttgccagccatacctggtgcagcggctcctggcggttgataatgattttgctgccattctcaaaggtaatggtcagtacgccgccgttgatttcgcagtcgatatcgctgtcgccatcccagtcgtccaggcgttcttcaatggtcagccagagttgatcagccaggcgatgaaattcactgtcgttcattgttgtatcctgtttttaagtgatggcggcagtatagcggcatggggtcagggcttcaaagtttgcacctctgcggctgcgttccggcacgatagttccgtcaccggaataatgatgtctctgtgtagcgaaagatttgtctctagtttagggcgcagttacaccacgtctttccctgtttctggtaaacattatgatcaggtttaccgagcgagcatcctcacgctgacggaactaaaaaagacaacaaacaaaccacattgcgatagtgcataaagccatcctggcgcgaggtgccgatcacgaaactaccagcaaaacataaatccccacgagtaagcgttatactcgcagcatttcctcacttttcagacttcataaagagtcgctaaacgcttgcttttacgtcttctcctgcgatgatagaaagcagaaagcgatgaactttacaggcaatccataatgaaaaacgtgtttaaggcactcactgtattacttactctcttcagcctgacgggctgcggtctgaaaggtccgctctatttcccgcctgcagataaaaacgcaccgccgccgaccaaaccggtagagacgcaaacgcaatccacggtgccggataaaaacgatcgcgccactggcgatggtccatcccaggtgaattactaaaagtcagtttctgtacccgcgtgattggagtaaatgatgcagttcagcaaaatgcatggccttggcaacgattttatggtcgtcgacgcggtaacgcagaatgtcttttttagtccggagctgattcgtcgcctggctgatcggcacctgggggtagggtttgaccaactgctggtggttgagccgccgtatgatcctgaactggattttcactatcgcattttcaatgctgatggcagtgaagtggcgcagtgcggcaacggtgcgcgctgctttgcccgttttgtgcgtctgaaaggactgaccaataagcgtgatatccgcgtcagcaccgccaacgggcggatggttctgaccgtcaccgatgatgatctggtccgcgtaaatatgggcgaacccaacttcgaaccttccgccgtgccgtttcgcgctaacaaagcggaaaagacctatattatgcgcgccgccgagcagacaatcttatgcggcgtggtgagcatgggaaatccgcattgcgtgattcaggtcgatgatgtcgataccgcggcggtagaaacgcttggtcctgttctggaaagccacgagcgttttccggagcgcgccaatatcggttttatgcaagtggttaagcgcgagcatattcgtttacgcgtttatgagcgtggggcaggagaaacccaggcctgcggcagcggcgcgtgtgcggcggttgcagtagggattcagcaaggtttgctggccgaagaagtacgcgtggaactccccggcggtcgtcttgatatcgcctggaaaggtccgggtcacccgttatatatgactggcccggcggtacatgtctacgacggatttattcatctatgaagcaaccaggggaagaactgcaggaaacactcacggagcttgatgaccgggcggttgtcgattatctgattaaaaatcctgagttttttatccgtaatgcgcgcgcagtagaagcgatacgtgtgccgcatccggtacgcggcaccgttagcttggtcgagtggcacatggcccgcgcacgtaatcatattcatgttctggaagagaacatggcgctgttgatggaacaggctatcgccaacgaaggcctgttttatcgcctactctacctgcagcgcagtctcaccgccgccagcagtctcgacgatatgctgatgcgctttcaccgctgggcgcgcgatctcggcctggcaggtgcgagtctgcgcctgtttccggatcgctggcgcttaggtgcgccgagcaaccacactcatctggcattaagccgtcagtctttcgaaccgctgcgtattcagcgtttggggcaggaacagcactatcttgggccgcttaacggaccagagctgctggtggtgctaccggaagcgaaagcggtgggaagcgtggcgatgagcatgctgggaagcgatgctgatttgggtgtcgtgctgtttaccagtcgcgatgccagtcactatcaacaagggcaaggaacgcagttacttcatgaaattgcgctgatgttgccggagcttctggagcgttggattgaacgcgtatgaccgatttacacaccgatgtagaacgctacctacgttatctgagcgtggagcgccagcttagcccgataaccctgcttaactaccagcgtcagcttgaggcgatcatcaattttgccagcgaaaacggcctgcaaagctggcagcaatgtgatgtgacgatggtgcgcaattttgctgtacgcagtcgccgtaaagggctgggagcagcaagtctggcgttacggctttctgcgctacgtagcttttttgactggctggtcagccagaacgaactcaaagctaacccggcgaaaggtgttagcgcaccgaaagcgccgcgtcatctgccgaaaaacatcgacgtcgacgatatgaatcggctgctggatattgatatcaatgatcccctcgctgtacgcgaccgtgcaatgctggaagtgatgtacggcgcgggtctgcgtctttctgagctggtggggctggatattaaacacctcgacctggagtctggtgaagtgtgggttatggggaaaggcagcaaagagcgccgcctgccgattggtcgcaacgctgtggcgtggattgagcactggcttgatttgcgcgacctgtttggtagcgaagacgacgcgctttttctgagcaaactgggcaagcgtatctccgcgcgtaatgtgcagaaacgctttgccgaatggggcataaaacaagggctgaataatcacgttcatccgcataaattacgtcacagcttcgccacgcatatgctggagagcagcggcgatcttcgtggtgtgcaggagctgctgggtcatgccaacctctccaccacgcaaatctatactcatcttgattttcaacaccttgccagcgtgtacgatgcggcgcatccacgcgccaaacgggggaaataatgcgtttttaccggcctttggggcgcatcagcgcgctcacctttgacctggatgataccctttacgataaccgtccggtgattttgcgcaccgagcgagaggcgcttacctttgtgcaaaattatcatccggcgctgcgcagcttccagaatgaagatctgcaacgcctgcgccaggcggtacgggaagcggaacccgagatttatcacgacgtgacgcgctggcgttttcgtagcattgaacaagcgatgctcgacgccgggctgagtgccgaagaagccagtgcaggcgcacacgcagcaatgatcaactttgccaaatggcgcagccgaatcgacgtcccgcagcaaactcacgacaccttaaaacagctggcgaagaaatggccgctggtggcgatcaccaacggtaacgcccagccggagctgtttggtttgggggattattttgagtttgtgctgcgcgctggcccgcacgggcgcagtaaaccgttcagcgatatgtactttttggctgcggaaaaactcaacgtgccgatcggcgagatcttacatgttggggacgatctcaccactgacgtgggtggggcaattcgcagcggaatgcaggcttgttggatcagaccggaaaatggcgatctgatgcaaacctgggacagccgtttactgccgcatctggaaatttcccggttggcatctctgaccagcctgatataatcagcaaatctgtatatatacccagctttttggcggagggcgttgcgcttctccgcccaacctatttttacgcggcggtgccaatggacgtttcttacctgctcgacagccttaatgacaaacagcgcgaagcggtggccgcgccacgcagcaaccttctggtgctggcgggcgcgggcagtggtaagacgcgcgtactggtgcatcgtatcgcctggttgatgagcgtggaaaactgcagcccatacagcattatggcggtgacgtttaccaacaaagcggcggcggagatgcgtcatcgtatcgggcaactgatgggcacgagccagggcggtatgtgggtcggcaccttccacgggctggcgcaccgtttgctgcgtgcgcaccatatggacgccaatctgccgcaggatttccagatcctcgacagtgaagaccagctacgcctgcttaagcgtctgatcaaagccatgaacctcgacgagaagcagtggccgccgcggcaggcaatgtggtacatcaacagccagaaagatgaaggcctgcgtccgcatcatattcaaagctacggtaatccggtggagcagacctggcagaaggtgtatcaggcgtatcaggaagcgtgtgaccgcgcgggcctggtggacttcgccgagctgctgctgcgcgctcacgagttgtggcttaacaagccgcatatcctgcaacactaccgcgaacgttttaccaatatcctggtggacgaattccaggataccaacaacattcagtacgcgtggatccgcctgctggcgggcgacaccggcaaagtgatgatcgtcggtgatgacgaccagagtatctacggctggcgcggggcgcaggtggagaatattcagcgtttccttaatgatttccccggtgccgaaactattcgtctggagcaaaactaccgctctaccagcaatattctgagcgccgctaacgccctgattgaaaacaataacgggcgtctgggtaaaaaactgtggaccgatggcgcggacggtgagcctatttccctctattgcgcttttaacgaactcgatgaagcgcgttttgtggttaaccgcatcaaaacctggcaggacaacggcggagcgcttgccgagtgcgccattctctaccgcagcaacgcccagagccgggtgctcgaagaggcgttattgcaggccagtatgccgtaccgtatttacggcgggatgcgcttcttcgaacgccaggaaatcaaagatgcgctcagctatctgcgcctgattgccaaccgcaacgacgacgcggcctttgagcgtgtggtgaatacgccaacgcggggtattggtgaccggacgctggacgtggtacgtcagacaagccgcgatcgccagttaacactctggcaggcatgtcgtgagctgttgcaggaaaaagccctcgccgggcgagctgccagcgccttgcagcgatttatggaattaatcgacgccttagcgcaggaaactgccgatatgccgctgcatgtacagactgaccgggtaattaaagactccggcctgcgtaccatgtatgagcaggagaagggcgaaaaaggtcagacgcgtatcgaaaacttagaggaactggtgacggcaacgcgccagttcagctacaacgaagaagacgaagatttaatgccgctgcaggcgttcctctcccatgcggcactggaagcaggtgaagggcaggcggatacctggcaggatgcggtgcagttgatgacgctacacagcgcgaaaggcctggagttcccgcaggtgtttatcgttggtatggaagagggcatgttcccaagccagatgagcctggatgaaggcgggcgtctggaagaagaacgccgtctggcctacgttggcgtaacccgcgcgatgcagaaactgacgctgacctacgcggaaacccgccgtctgtatggtaaagaggtttaccatcgcccgagccgctttatcggcgagctgccggaagagtgtgtggaagaggtgcgcctgcgcgccacggtaagccgcccggtcagccatcagcggatgggtacgccgatggtcgagaacgacagcggctacaagctcggccagcgcgtacgccacgctaagtttggtgaaggcaccattgtcaatatggaaggcagcggtgagcatagccgtttgcaggtggcatttcagggccagggtattaaatggctggtggcggcatacgcccggctggagagcgtgtaacgttgccggatgcggtgctgcgcaccttatttggcctaaaaaatcattcagattcaataaattgcaacgtcatgtaggccggatagggcgtttacgccgcatccggcatctgcgccatcttcagtatctgacacaaaactatcgttttaacctttccgctcgacggaaatcatggtgacaaaaggatagcgttgccacgggattgccccgcctttcatatacatatgactaatcgtgccatcaagataaagcagctgctcaacgttcagtttcgctttggcataacaggcaaaatcataaaaatttgttgcctgctggctcaacaaaaacacggcgttcccatgtttattaatcccaacaccgttacgaattttgctactggcgacgttgggatgaatacgcggattaattacaccgttttccatcaacattggcccactctgcaccgcaaactgaatctctttactggttttgaaggcatccagacgaacgatgccgactttatctcccgcgacataaaacacgccgccaggacggataaagaaattcccttcaccactagcgagatttaacgccaccttctgctgaccgttttcgatgtacaaaccgagcggcgcatagctttcatcatagatgccgccgttcatcgccatctgcacctgaccctgactattaatatccgccagcagagcatgtaacgttccccacgcttcgccattggctttttgccagtacattttcacccgctctgtttgaggattaacggtatacgcctgtacggtcagcgtcggatcactgagtgcgcaatcatcagcggcaacagcaaacaagggaagtaaggtgagggcgagaaaaatccgtttgagattcaaggtgatcattcctttaccaatgagtagctgatgcgccattataggtcctggatgtgggatttttttatcctgttagcgaccttgacgagtaccaaaaagcgcgaagttcaactattgttctgtggtgttctgttgcgtgttgacggcaaaattttgctggcgtaacatgcgcgcacgatcactctaagaggacattcgccttggacacacccagtagatactggctcactatcctgtcatccaggatcaactcctaaggctatccctttttgctgatagccttagcggttgtcagcgacctcaatttttcccgtcgcgctgagtcaggctgtttaatggtctgaaacccaatttgtttctgtgtgcccaccgaactgtccgatattttaagcattgggagtcccggtcatgctgagcgcatttcaactggaaaataaccgactgacccggctggaagtcgaagagagtcaaccccttgtaaatgcagtatggattgatcttgtcgaaccggacgacgacgagcgactgcgcgtacaatctgaacttggccagagcctggcaacccgcccggaactggaagacatcgaagcaagcgcacgtttctttgaagacgacgacggcctgcatattcactccttcttcttctttgaagatgcggaagatcacgccggtaactccactgtggcatttaccatccgtgatggtcgtctgtttactctgcgtgagcgtgaactgcccgcttttcgtctgtatcgtatgcgtgcccgtagccagagcatggtagacggtaacgcctacgagttgctgctggatctgttcgaaaccaaaatcgaacagttggcagatgaaattgaaaatatctatagcgacctggagcagttgagccgggtgattatggaagggcatcagggcgatgagtacgacgaggcgctctccactctggcggaactggaagatatcggctggaaagttcgcctgtgtctgatggatacccagcgcgcgctcaacttcctggtgcgtaaagcgcgtttaccgggtgggcaactggagcaggcgcgtgaaatcctgcgagatatcgaatccctgctgccgcataacgaatccctgttccagaaggtgaacttcctgatgcaggcggcaatgggttttatcaacatcgagcagaaccgcatcatcaaaatcttcagcgtggtatccgtggtattcctgccgccgacgctcgttgcttccagctatggcatgaactttgagtttatgccagaactgaagtggagcttcggctaccctggcgcgattatctttatgatcctcgcgggcctggcaccgtatctgtactttaagcggaagaactggttgtaaaaaacgagagcggtggcttagtctggctaagccacctgttattcaaaggctccaggtatttaacccttttacctctttctcatagaaccatttgttcgtgttaacagcaacataggctgctacggcaattcccagaatgttaacgccaattagtgcaccaacaaatagagatagaataccaagtaatagaactataattgcttttttccataaccccaggacaaataaatatatccaggaacagaagaaagcaatgaaattcatttgaatagttaagcgttgtcttacttttaatgctttaaatgctgctttatattctggtgttgccccccagaatccaggaaaaccatgttgatcataaaaattaaatcggtatttccatttttcacttaaactaccatcgttcatatattccttactcataaatactccataattattgtttactactatcagtaggtgcaagcattagcatactgaaagtggaaaaataacaaatcaaaaaaatcatgctaccattgccactacaggcaaaatcttcggctatcattgtgatgatagagatgatatatactgctaatgtaccaaaaacataagtttttatatagatgaaaccactatcacggagtcgctggcaattcatgttgatgacgagataatggagtacgatggtagagactataacaagaaagcctgcttctccatcgttaaaaaagataataagaaaggcaaaaatgaaatttattaaaataaaactaaatatataacgacgtctggaaatcttaccgttagatgttgggataaatatacgtaacataaattttacatccttgtatgagtctccggtcagcatggcaatatgcccactctcatgcaagagtcggcatattttttcagaatatatttattttttatttggacgttctacgctgcgtataaatcgcatccatcacaaaaattgccagcgccacccaaataaaggcgaaagtcaccatcttatcggcacccggtttttcaccataaaacgtcacagccagcaggaacatcagcgtcgggccaatgtactggaaaaagcctaacgtactgagacgcaagcgcgtggcagcggcggtaaaacacaacagcggtacggtagtgacaataccggcggcgatcagcagtaaattcaggctcatcgggttttgccccatatggctggtactgctgtcggcaatagcaaacaggtaaattgccgccacgggcagcagccacatggtttcgattaacatgccggtttgcgcttcaacggcaatcttcttgcgtaccagaccgtagaaggcaaaactaaatgccagtcccagcgcgataataggtaggctaccaaaagtccacagctggactaacacgccacatatcgccagaatcaccgccagccattgcatccggcggaatcgctcgccgaggaaaatcatccccagcacaatgttcaccagcgggttaataaagtaaccaaggctcgcttccagcatatggtgattgttcaccgcccagataaacagtagccagttgccaccaatcagcacggcagagactgccagcataaaaattttctgtggcgtctgaatcagcgtttttaaataggaccactggcggcaaatgctcatcagcaccaccataaagaaaaagctccagatcacgcgatgcgtcaggatttcatcggcgggcacgtagtaaatcaacttgaagtacgctggcgctataccccaaataaaataagcggcaagagcgagtaatacgccctgccgcgtttgttttgcatccatcgggaatactcatttttaattggtaacagcagtttacctgcttttatgtcttcaacctaccatataggtggcggtggcactggcaatataaagctgttcttcattgtgtaattcaacgcgggcgacggcgactttattgcctgcacgcaacaggctactagtagcagtaaaacgctcgcccctgcctgggcgcagataatcaacgcgaagatcaatggtccccatccggcttagccgctggcgtagttcatcttcactgatggtttcgtggcgggttaaggtacttcccacgcacaccagaccggcggcgacatccagcgcgctcgcaatgaccccgccgtgcaaaatgctttgcgcccagttgcccaccatcattggctgatttttaaaggccagctgtgcgaactctttttcgtaacgctccagttccatccccaatgcgcggttaaatggcatgtgataaacaaacatctcacccactaatttcagggcttgttcagcggtcagtacggcagacatatcatccttacacttcattggttaatgaaatgttgattttatgcttctttgttgttggtttctactttaggaagggataactaacggctatggagttaagtatgtaaaatagcccgcagaaaaatattcaccttatcaataattcgttacggagaacacgaccgatgcggactctgcagggctggttgttgccggtgtttatgttgcctatggcagtatatgcacaagaggcaacggtgaaagaggtgcatgacgcgccagcggtgcgtggcagtattatcgccaatatgctgcaggagcatgacaatccgttcacgctctatccttatgacaccaactacctcatttacacccaaaccagcgatctgaataaagaagcgattgccagttacgactgggcggaaaatgcgcgtaaggatgaagtaaagtttcagttgagcctggcatttccgctgtggcgtgggattttaggcccgaacagcgtgttgggtgcgtcttatacgcaaaaatcctggtggcaactgtccaatagcgaagagtctagtccgtttcgtgaaaccaactacgaaccgcaattgttcctcggttttgccaccgattaccgttttgcaggttggacgctgcgcgatgtggagatggggtataaccacgactctaacgggcgttccgacccgacctcccgcagctggaaccgcctttatactcgcctgatggcagaaaacggtaactggctggtagaagtgaagccgtggtatgtggtgggtaatactgacgataacccggatatcaccaaatatatgggttactaccagcttaaaatcggctatcacctcggtgatgcggtgctcagtgcgaaaggacagtacaactggaacaccggctacggcggcgcggagttaggcttaagttacccgatcaccaaacatgtgcgcctttatactcaggtttacagcggctatggcgaaagcctcatcgactataacttcaaccagacccgtgtcggtgtgggggttatgctaaacgatttgttttgatgaacggttgagtggttggcaaatctggaatccagcatccaggattaccctctcagagactaaaagcattgcagtttctcgcgcaggcgctgaaaatagcgcctgtttttatttcaggcaatcggggtgaatgtggcgcaggcggaagtgttgaatctggagtccggagctaaacaggttttacaagaaacctttggctaccaacagtttcgccccggccaggaagaaattatcgacactgtgctttccggccgcgattgcctcgtcgtcatgcccactggtggcggaaaatccctttgctatcaaatccctgccttattgctaaacggccttaccgtggttgttagtccgctgattagcttgatgaaagatcaggtggatcaactgcaagccaacggcgtggcggcggcgtgccttaacagcacgcaaacccgcgaacagcaacttgaagtgatgacaggctgccgcaccgggcaaattcgtctgctttatatcgccccggaacgcctgatgctggataactttcttgagcatctggcgcactggaatccggtgttattagccgttgatgaagcgcactgtatctcccaatggggccacgatttccgcccggaatatgccgcgctcggtcagttgcgccagcggttcccgacgctgccgtttatggcgctgaccgccacagccgacgacaccacgcgccaggatatcgtgcgcctgctggggctgaacgatccgctgattcaaatcagcagttttgaccgtccgaatattcgctacatgctgatggagaagttcaaaccgctcgatcagttgatgcgctacgtgcaggaacagcgcggtaagagtggcattatctactgcaacagccgcgcgaaagtagaagacaccgctgcgcgcctgcaaagcaagggaattagcgcggcggcctatcatgccgggctggaaaataatgttcgcgccgatgtgcaggaaaaattccagcgcgatgacctgcaaattgtggtggcgacggtggcgttcggcatgggcatcaataaaccaaacgttcgcttcgtggtccactttgatattccgcgcaatatcgaatcctattatcaggaaaccggacgcgccgggcgtgatggcctgcccgcggaagcgatgctgttttacgatccggctgatatggcgtggctgcgccgttgtctggaagagaagccgcaggggcagttgcaggatatcgagcgccacaaactcaatgcgatgggcgcgtttgccgaagcgcaaacttgccgtcgtctggtattgctgaactattttggcgaagggcgtcaggagccgtgcgggaactgcgatatctgcctcgatccgccgaaacagtacgacggtagtaccgatgctcagattgccctttccaccattggtcgtgtgaatcagcggtttgggatgggttatgtggtggaagtgattcgtggtgctaataaccagcgtatccgcgactatggtcatgacaaactgaaagtctatggcatgggccgtgataaaagccatgaacattgggtgagcgtgatccgccagctgattcacctcggcctggtgacgcaaaatattgcccagcattctgccctacaactgacagaggccgcgcgcccggtgctgcgcggcgaatcctctttgcaacttgccgtgccgcgtatcgtggcgctcaaaccgaaagcgatgcagaaaagcttcggcggcaactatgatcgcaaactgttcgccaaattacgcaaactgcgtaaaagcatagccgatgaaagtaatgtcccgccgtacgtggtgtttaacgacgcaaccttgattgagatggctgaacagatgccgatcaccgccagcgaaatgctcagcgttaacggcgttgggatgcgcaagctggaacgctttggcaaaccgtttatggcgctgattcgtgcgcatgttgatggcgatgacgaagagtaatcagcagcataaaaaagtgccagtatgaagactccgtaaacgtttcccccgcgagtcaaatgtatgttgatgttatttctcaccgtcgccatggtgcacattgtggcgcttatgagccccggtcccgatttcttttttgtctctcagaccgctgtcagtcgttcccgtaaagaagcgatgatgggcgtgctgggcattacctgcggcgtaatggtttgggctgggattgcgctgcttggcctgcatttgattatcgaaaaaatggcctggctgcatacgctgattatggtgggcggtggcctgtatctctgctggatgggttaccagatgctacgtggtgcactgaaaaaagaggcggtttctgcacctgcgccacaggtcgagctggcgaaaagtgggcgcagtttcctgaaaggtttactgaccaatctcgctaatccgaaagcgattatctactttggcagcgtgttcagtttgtttgtcggtgataacgttggcactaccgcgcgctggggcatttttgcgctgatcattgtcgaaacgctggcgtggtttaccgtcgttgccagcctgtttgccctgccgcaaatgcgccgtggttatcaacgtctggcgaagtggattgatggttttgccggggcgttatttgccggatttggcattcatttgattattagccggtgatgccagacgcgtcttcagagtaagtcggataaggcgtttacgccgcatccgacattatttttcacgcatgcctcgcgcttgctaacagcgctcccaccagcataaacaagctgccgaaaatcttattcagcgccttcatctgctttggtcctttaatccatagagcaatccgttgagcaagggtggcgtaaccgatcatcacaataatatcgaccacaatagtggtgacgccgagcacgatatactgcatcagttgcggctgttgcggcatgatgaattgcggaaatagcgccgccagaaacacaatacttttgggattggtgagattcacaaaaactgcgcgctggaacaaatgtcgacggctttgagtagaggccaggcttttaaggtcaattgcaccagcggcgcgccactgctggattcccagccaaatcaagtaagccgcgcctgcccacttcaacacttcaaacgcaatcacactgcgggaaaatagcgtccccaaccccacgccaaccagcacaatatgaatcgccagtccggtctgaagcccagcaatagacgccaccgcgccgcgataaccgtggttgaggctggtggtcatagtgttgattgcaccagagcctgggctcaggcttaaaatgatgcttgtcagcaggtaggcaaaccaccattctaaggtcatgatgaactcccggtgtgtctatttttgtgccacaatacgctactgtcgcagcgttgtgtcaggcacgctaaaaaaaacgattttacgtggtttaagaggcagattacccgatgtttcagcagcaaaaagactgggaaacaagagaaaacgcgtttgctgcttttaccatgggaccgctgactgatttctggcgtcagcgtgatgaagcagagtttactggtgtggatgacattccggtgcgctttgtccgttttcgcgcacagcaccatgaccgggtggtagtcatctgcccggggcgtattgagagctacgtaaaatatgcggaactggcctatgacctgttccatttggggtttgatgtcttaatcatcgaccatcgcgggcagggacgttccggtcgcctgttagccgatccgcatctcgggcatgttaatcgctttaatgattatgttgatgatctggcggcattctggcagcaggaggttcagcccggtccgtggcgtaaacgctatatactggcacatagcatgggcggtgcgatctccacattatttctgcaacgccatccaggtgtatgtgacgccattgcgctaactgcgccaatgtttgggatcgtgattcgtatgccgagttttatggcacggcagatcctcaactgggccgaagcgcatccacgtttccgtgatggctatgcaataggcaccgggcgctggcgcgcgttgccgtttgctatcaacgtactgacccacagcagacagcgatatcgacgtaacttacgcttctatgctgatgacccaacgattcgcgtcggtgggccgacctaccattgggtacgcgaaagtattctggctggcgaacaggtgttagccggtgcgggtgatgacgccacgccaacgcttctcttgcaggctgaagaggaacgcgtggtggataaccgcatgcatgaccgtttttgtgaactccgcaccgccgcgggccatcctgtcgaaggaggacggccgttggtaattaaaggtgcttaccatgagatcctttttgaaaaggacgcaatgcgcagtgtcgcgctccacgccatcgttgattttttcaacaggcataacagtcccagcggaaaccgctctacagaggtttaaatttcttatgtaccaggttgttgcgtctgatttagatggcacgttactttctcccgaccatacgttatccccttacgccaaagaaactctgaagctgctcaccgcgcgcggcatcaactttgtgtttgcgaccggtcgtcaccacgttgatgtggggcaaattcgcgataatctggagattaagtcttacatgattacctccaatggtgcgcgcgttcacgatctggatggtaatctgatttttgctcataacctggatcgcgacattgccagcgatctgtttggcgtagtcaacgacaatccggacatcattactaacgtttatcgcgacgacgaatggtttatgaatcgccatcgcccggaagagatgcgcttttttaaagaagcggtgttccaatatgcgctgtatgagcctggattactggagccggaaggcgtcagcaaagtgttcttcacctgcgattcccatgaacaactgctgccgctggagcaggcgattaacgctcgttggggcgatcgcgtcaacgtcagtttctctaccttaacctgtctggaagtgatggcgggcggcgttagtaaaggccatgcgctggaagcggtggcgaagaaactgggctacagcctgaaggattgtattgcgtttggtgacgggatgaacgacgccgaaatgctgagcatggcggggaaaggctgcattatgggcagtgcgcaccagcgtctgaaagaccttcatcccgagctggaagtgattggtactaatgccgacgacgcggtgccgcattatctgcgtaaactctatttaagctaatcgttctttatttggtcagttgtcaacctgatacttcgctacaatggatacccgttaatcaaagagttttccattgtggcgctacttatcatcaccacgattctgtgggccttctcctttagcttttatggcgagtaccttgcggggcacgtcgatagctattttgcggtgctggtgcgcgttggcctggcggcactcgtttttctgccgtttctgcgtacccgtggcaatagcctgaaaacggtcggcctgtatatgctggtgggcgcgatgcagcttggcgtgatgtatatgctgagtttccgcgcttatctctacctgacggtttccgagctgctgctgttcaccgtgctgacgccgctctacatcacgctgatttatgacatcatgagtaagcgccgtctgcgctggggctatgcctttagcgccttgctggcggtgattggtgccgggattattcgctatgatcaggtcaccgaccatttctggactggcttgctgctggtgcaactctccaatatcacttttgccattggcatggtgggttacaaacgcctgatggaaactcgcccgatgccacagcataacgcctttgcgtggttctatcttggcgcgtttctggtggcagtgattgcatggttcttgctgggaaatgcgcagaaaatgccgcaaaccacgctgcaatggggcattctggtgtttcttggcgtggtggcttccgggattggctactttatgtggaactacggcgcgacgcaggtggacgccggaacgctgggcattatgaataatatgcacgttccggcagggctgctggtaaacctggctatctggcaccaacagccgcactggccaacgtttattacaggcgcgctggtgatcctggccagtctgtgggtgcatcgtaagtgggtcgctccgcgctctagtcaaacggcagatgatcgcaggcgtgattgcgcgctgagcgaataattacaggcgcgctggacttcctggcctcactgtgggtgcatcgtaagtgggtcgctccgcgctcttcacaaacggcagatgatcgcaggcgtgattgcgcgcactgcgaataaacgcttccgtaactggctgacgctgctcgccatcgcgcacggcggcgtacagtcggctccacaagccttcgcccagggttttggtcaccaccagaccctggcgctcaaaactctctactacccaatgcggtagcgcggcaatacccatccgcgcggcaaccatctgaatcaacaataaggtgttatcgacgcttttcagactcgggctgacgcctgccggctgaagaaaatgccgccagacatccagtcgactacgctgcaccggataaattaatagcgtctcgctggcgagatcttccggtgtaattcgcgttttcgccgccagtggatggtcaggtgctaacaccagacgcacttcatagtcgaacatcgggctataatgcaggccactgcgcggcagaatatcggacgtcattaccagatccagctctccctgttgcaaggcgggctgcgggtcaaatgtcacgccgcttttaaaatccatctctacctgcggccagttcttatggaaattttctaacgcgggtgtcagccactgaatacagctatggcactcaatggcaatgcgcagacgcgtctgctgcggttcattgcaggcttgcagggcctggctaatttgcggcagtacctggtttgccagttgcaacaggatttctccctgcggtgtaaagcgtagcggctggctcttacgcacaaatagccggaagccaaggcgttgttccagatcgctaaactggtgagacagggcggattgcgtctgatgcaacgtcgccgcagcggctgcgaggctgccgcagttccgcaacgcttgtagcgttttcaggtgttttacttcgatcatgaaagtccttcacttcggcatgaataatttgcgcttgaggaatatacagtaaccgccaattatggatgtgtaaacatctggacggctaaaatccttcgtcttttaaatttatggtgcgttggctgcgtttctccaccccggtcacttacttcagtaagctcccggggatgaataaacttgccgccttccctaaattcaaaatccataggatttacatataattagaggaagaaaaaatgacaatattgaatcacaccctcggtttccctcgcgttggcctgcgtcgcgagctgaaaaaagcgcaagaaagttattgggcggggaactccacgcgtgaagaactgctggcggtagggcgtgaattgcgtgctcgtcactgggatcaacaaaagcaagcgggtatcgacctgctgccggtgggcgattttgcctggtacgatcatgtactgaccaccagtctgctgctgggtaacgttccggcgcgtcatcagaacaaagatggtagcgtagatatcgacaccctgttccgtattggtcgtggacgtgcgccgactggcgaacctgcggcggcagcggaaatgaccaaatggtttaacaccaactatcactacatggtgccggagttcgttaaaggccaacagttcaaactgacctggacgcagctgctggacgaagtggacgaggcgctggcgctgggccacaaggtgaaacctgtgctgctggggccggttacctggctgtggctggggaaagtgaaaggtgaacaatttgaccgcctgagcctgctgaacgacattctgccggtttatcagcaagtgctggcagaactggcgaaacgcggcatcgagtgggtacagattgatgaacccgcgctggtactggaactaccacaggcgtggctggacgcatacaaacccgcttacgacgcgctccagggacaggtgaaactgctgctgaccacctattttgaaggcgtaacgccaaatctcgacacgattactgcgctgcctgttcagggtctgcatgttgacctcgtacatggtaaagatgacgttgctgaactgcacaagcgcctgccttctgactggttgctgtctgcgggtctgatcaatggtcgtaacgtctggcgcgccgatcttaccgagaaatatgcgcaaattaaggacattgtcggcaaacgtgatttgtgggtggcatcttcctgcagcttgctgcacagccccatcgacctgagcgtggaaacgcgtcttgatgcagaagtgaaaagctggtttgccttcgccctacaaaaatgccatgaactggcactgctgcgcgatgcgctgaacagtggtgacacggcagctctggcagagtggagcgccccgattcaggcacgtcgtcactctacccgcgtacataatccggcggtagaaaagcgtctggcggcgatcaccgcccaggacagccagcgtgcgaatgtctatgaagtgcgtgctgaagcccagcgtgcgcgttttaaactgccagcgtggccgaccaccacgattggttccttcccgcaaaccacggaaattcgtaccctgcgtctggatttcaaaaagggcaatctcgacgccaacaactaccgcacgggcattgcggaacatatcaagcaggccattgttgagcaggaacgtttgggactggatgtgctggtacatggcgaggccgagcgtaatgacatggtggaatactttggcgagcacctcgacggatttgtctttacgcaaaacggttgggtacagagctacggttcccgctgcgtgaagccaccgattgtcattggtgacattagccgcccggcaccgattaccgtggagtgggcgaagtatgcgcaaagcctgaccgacaaaccggtgaaagggatgctgacggggccggtgaccatactctgctggagcttcccgcgtgaagatgtcagccgtgaaaccatcgccaaacagattgcgctggcgctgcgtgatgaagtggccgatctggaagccgctggaattggcatcatccagattgacgaaccggcgctgcgcgaaggtttaccgctgcgtcgtagcgactgggatgcgtatctccagtggggcgtagaggccttccgtatcaacgccgccgtggcgaaagatgacacacaaatccacactcacatgtgttattgcgagttcaacgacatcatggatagcattgcggcgctggacgcagacgtcatcaccatcgaaaccagccgttccgacatggagttgctggagagctttgaagagtttgattatccaaatgaaatcggtcctggcgtctatgacattcacagcccaaacgtaccgagcgtggaatggattgaagccttgctgaagaaagcggcaaaacgcattccggcagagcgcctgtgggtcaacccggactgtggcctgaaaacgcgcggctggccagaaacccgcgcggcactggcgaacatggtgcaggcggcgcagaacttgcgtcgggggtaaaatccaaaccgggtggtaataccacccggtcttttctcattacaggctcttcttcccaccatactgcttaaaccattccagcatacgctgccagccatcttctgcagatgcggcatgatagctcgggcgataatcagcgttgaatgcatgcccggcgtccgggtacacgataatctctgctttcgcattagcagcccgcagcgcctggcgcatggtttcaacgctctcctgcggaatgctgttatcctgaccaccatataagccgagaatcggcgcgttaagatcggttgcgatatcaacaggttgtttcggactattcaggctcttgtcgcccgtcagtttgccgtaccacgccactgcggcttttagctgtggattatgcgcggcatacagccaggtgatacgtccaccccagcagaatccggtgatcattaaacgatgaacatcgccgccgttgcgggaagcccaactggcgacatgatcgagatcggccagcacctggctgtcaggcacttttgctaccagaccgctaagcaacgtggggatatcggcaaaatcattcggatcgccttcgcggaagtaaagttcaggtgcgatagccagatacccctccagcgccagacggcgacaaatgtcgcggatatgttcatgcacgccaaaaatttcctgcactacaatgaccactggcagtgggccatcgctttgctttggtctggcatggtaagcaggcatgttatccccttgactagggatagaggtgaagcccgccacaatcgcgtcgtccggggtctgaacgatggtgctagcgagagggcttgcagcaggtgcaaatccagattgttgtgttgttgccatggtattctccgtacccttataaaaatgttgcgcaatgttaactatagtcagcatgcaacaaatcacattgcctgaatcggctcatcttttatgcagtcctgcagaatgaagggtgatttatgtgatttgcatcacttttggtgggtaaatttatgcaacgcatttgcgtcatggtgatgagtatcacgaaaaaatgttaaacccttcggtaaagtgtctttttgcttcttctgactaaaccgattcacagaggagttgtatatgtccaagtctgatgtttttcatctcggcctcactaaaaacgatttacaaggggctacgcttgccatcgtccctggcgacccggatcgtgtggaaaagatcgccgcgctgatggataagccggttaagctggcatctcaccgcgaattcactacctggcgtgcagagctggatggtaaacctgttatcgtctgctctaccggtatcggcggcccgtctacctctattgctgttgaagagctggcacagctgggcattcgcaccttcctgcgtatcggtacaacgggcgctattcagccgcatattaatgtgggtgatgtcctggttaccacggcgtctgtccgtctggatggcgcgagcctgcacttcgcaccgctggaattcccggctgtcgctgatttcgaatgtacgactgcgctggttgaagctgcgaaatccattggcgcgacaactcacgttggcgtgacagcttcttctgataccttctacccaggtcaggaacgttacgatacttactctggtcgcgtagttcgtcactttaaaggttctatggaagagtggcaggcgatgggcgtaatgaactatgaaatggaatctgcaaccctgctgaccatgtgtgcaagtcagggcctgcgtgccggtatggtagcgggtgttatcgttaaccgcacccagcaagagatcccgaatgctgagacgatgaaacaaaccgaaagccatgcggtgaaaatcgtggtggaagcggcgcgtcgtctgctgtaattctcttctcctgtctgaaggccgacgcgttcggccttttgtatttttgcgtagcgcctcgcaggaaatgcctttccaactggacgtttgtacagcacaattctattttgtgcgggtaagttgttgcgtcaggaggcgttgtggatttcagtatcatggtttacgcagttattgcgttggtgggtgtggcaattggctggctgtttgccagttatcaacatgcgcagcaaaaagccgagcaattagctgaacgtgaagagatggtcgcggagttaagcgcggcaaaacaacaaattacccaaagcgagcactggcgtgcagagtgcgagttactcaataacgaagtgcgcagcctgcaaagtattaacacctctctggaggccgatctgcgtgaagtaaccacgcggatggaagccgcacagcaacatgctgacgataaaattcgccagatgattaacagcgagcagcgcctcagtgagcagtttgaaaacctcgccaaccgtatttttgagcacagcaatcgccgggttgatgagcaaaaccgtcagagtctgaacagcctgttgagcccgctacgtgaacaactggacggtttccgccgtcaggttcaggacagcttcggtaaagaagcacaagaacgccataccctgacccacgaaattcgcaatctccagcaactcaacgcgcaaatggcccaggaagcgatcaacctgacgcgcgcgctgaaaggcgacaataaaacccagggcaactggggcgaggtagtattgacgcgggtgctggaggcttccggtctgcgtgaagggtatgaatatgaaacccaggtcagcatcgaaaatgacgcccgcagccggatgcagccggatgtcatcgtgcgcctgccgcagggaaaagatgtggtgatcgacgccaaaatgacgctggtcgcctatgaacgctattttaacgccgaagacgactacacccgcgaaagcgcgctacaggaacatatcgcgagcgtgcgtaaccatatccgtttgctgggacgcaaagattatcaacagctgccggggctgcgaactctggattacgtgctgatgtttattcccgttgaacccgcttttttactggcgcttgaccgccagccggagctgatcaccgaagcgttgaaaaacaacatcatgctggttagcccgactacgctgctggtggcgctgcgcactatcgccaacctgtggcgttatgagcatcaaagccgcaacgcccagcaaatcgccgatcgtgccagcaagctgtacgacaagatgcgtttgttcatcgatgacatgtccgcgattggtcaaagtctcgacaaagcgcaggataattatcggcaggcaatgaaaaaactctctagtgggcgcggaaatgtgctggcgcaggcagaagcgtttcgcggtttaggagtagaaattaaacgcgagattaatccggatttggctgaacaggcggtgagccaggatgaagagtatcgacttcggagcgttccggagcagccgaatgatgaagcttatcaacgcgatgatgaatataatcagcagagccgctaacccattgggagtagttaagccgggtagaaatctagggcatcgacgcccaatctgttacacttctggaacaattttttgatgagcaggcattgagatggtggataagagtcaagaaacgacgcactttggttttcagaccgtcgcgaaggaacaaaaagcggatatggtcgcccacgttttccattccgtggcaagtaaatacgatgtcatgaatgatttgatgagttttggtattcatcgtttgtggaagcgattcacgattgattgcagcggcgtacgccgtgggcagaccgtgctggatctggctggtggcaccggcgacctgacagcgaaattctcccgcctggtcggagaaactggcaaagtggtccttgctgatatcaatgaatccatgctcaaaatgggccgcgagaagctgcgtaatatcggtgtgattggcaacgttgagtatgttcaggcgaacgctgaggcgctgccgttcccggataacacctttgattgcatcaccattagctttggtctgcgtaacgtcaccgacaaagataaagcactgcgtagtatgtatcgcgtgctgaaacccggcggccgcctgctggtgcttgagttcagcaagccaattatcgagccgctgagcaaagcctatgatgcatactccttccatgtgctgccgcgtattggcagtctggtcgcgaacgacgccgacagctaccgttatctggcagaatccatccgtatgcatcccgatcaggataccctgaaagccatgatgcaggatgccggattcgaaagtgtcgactactacaatctgacggcaggggttgtggcgctgcatcgtggttataagttctgacaggagaccggaaatgccttttaaacctttagtgacggcaggaattgaaagtctgctcaacaccttcctgtatcgcagtcccgcgctgaaaacggcccgcagccgtctgctgggtaaagtattgcgcgtggaggtaaaaggctttagcacgagtttgattctggtgttcagcgaacgccaggttgatgtactgggcgaatgggcaggcgatgctgactgcaccgttatcgcctacgccagtgtgttgccgaaacttcgcgatcgccagcagcttaccgcactgattcgcagtggtgagctggaagtgcagggcgatattcaggtggtgcaaaacttcgttgcgctggcagatctggcagagttcgaccctgcggaactgctggccccttataccggtgatatcgccgctgaaggaatcagcaaagccatgcgcggaggcgcaaagttcctgcatcacggcattaagcgccagcaacgttatgtggcggaagccattactgaagagtggcgtatggcacccggtccgcttgaagtggcctggtttgcggaagagacggctgccgtcgagcgtgctgttgatgccctgaccaaacggctggaaaaactggaggctaaatgacgccaggtgaagtacggcgcctatatttcatcattcgcacttttttaagctacggacttgatgaactgatccccaaaatgcgtatcaccctgccgctacggctatggcgatacagtttattctggatgccaaatcggcataaagacaaacttttaggtgagcgactacgactggccctgcaagaactggggccggtttggatcaagttcgggcaaatgttaagtacccgccgcgatctttttccaccgcatattgccgatcagctggcgttattgcaggacaaagttgctccgtttgatggcaagctggcgaagcagcagattgaagctgcaatgggcggcttgccggtagaagcgtggtttgacgattttgaaatcaagccgctggcttctgcttctatcgcccaggttcataccgcgcgattgaaaagcaatggtaaagaggtggtgattaaagtcatccgcccggatattttgccggttattaaagcggatctgaaacttatctaccgtctggctcgctgggtgccgcgtttgctgccggatggtcgccgtctgcgcccaaccgaagtggtgcgcgagtacgaaaagacattgattgatgaactgaatttgctgcgggaatctgccaacgccattcagcttcggcgcaattttgaagacagcccgatgctctacatcccggaagtttaccctgactattgtagtgaagggatgatggtgatggagcgcatttacggcattccggtgtctgatgttgcggcgctggagaaaaacggcactaacatgaaattgctggcggaacgcggcgtgcaggtgttcttcactcaggtctttcgcgacagctttttccatgccgatatgcaccctggcaacatcttcgtaagctatgaacacccggaaaacccgaaatatatcggcattgattgcgggattgttggcagcctaaacaaagaagataaacgctatctggcagaaaactttatcgccttctttaatcgcgactatcgcaaagtggcagagctacacgtcgattctggctgggtgccaccagataccaacgttgaagagttcgaatttgccattcgtacggtctgtgaacctatctttgagaaaccgctggccgaaattagctttggacatgtactgttaaatctgtttaatacggcgcgtcgcttcaatatggaagtgcagccgcaactggtgttactccagaaaaccctgctctacgtcgaaggggtaggacgccagctttatccgcaactcgatttatggaaaacggcgaagcctttcctggagagctggattaaagatcaggtcggtattcctgcgctggtgagagcatttaaagaaaaagcgccgttctgggtcgaaaaaatgccagaactgcctgaattggtttacgacagtttgcgccagggcaagtatttacagcacagtgttgataagattgcccgcgagcttcagagtaatcatgtacgtcagggacaaagccgttattttctcggaattggcgctacgttagtattaagtggcacattcttgttggtcagccgacctgaatgggggctgatgcccggctggttaatggcaggtggtctgatcgcctggtttgtcggttggcgcaaaacacgctgattttttcatcgctcaaggcgggccgtgtaacgtataatgcggctttgtttaatcatcatctaccacagaggaacatgtatgggtggtatcagtatttggcagttattgattattgccgtcatcgttgtactgctttttggcaccaaaaagctcggctccatcggttccgatcttggtgcgagcatcaaaggctttaaaaaagcaatgagcgatgatgaaccaaagcaggataaaaccagtcaggatgctgattttactgcgaaaactatcgccgataagcaggcggatacgaatcaggaacaggctaaaacagaagacgcgaagcgccacgataaagagcaggtgtaatccgtgtttgatatcggttttagcgaactgctattggtgttcatcatcggcctcgtcgttctggggccgcaacgactgcctgtggcggtaaaaacggtagcgggctggattcgcgcgttgcgtagtctggcgacaacggtgcagaacgaactgacccaggagttaaaactccaggagtttcaggacagtctgaaaaaggttgaaaaggcgagcctcactaacctgacgcccgaactgaaagcgagcatggatgaactacgccaggccgcggagagcatgaagcgttcctacgttgcaaacgatcctgaaaaggcgagcgatgaagcgcacaccatccataacccggtggtgaaagataatgaagctgcgcatgagggcgtaacgcctgccgctgcacaaacgcaggccagtagcccggaacagaagccagaaaccacgccagagccggtggtaaaacctgctgcggacgctgaaccgaaaaccgctgcaccttcccctagcagcagtgataaaccgtaaacatgtctgtagaagatactcaaccgcttatcacgcatctgattgagctgcgtaagcgtctgctgaactgcattatcgcggtgatcgtgatattcctgtgtctggtctatttcgccaatgacatctatcacctggtatccgcgccattgatcaagcagttgccgcaaggtagtacgatgatcgccaccgacgtggccagcccgttctttacgccgatcaagctgacctttatggtgagcctgattctgagtgcgccggtgattctctatcaggtgtgggcatttatcgccccagcgctgtataagcatgaacgtcgcctggtggtgccgctgctggtttccagctctctgctgttttatatcggcatggcattcgcctactttgtggtctttccgctggcatttggcttccttgccaataccgcgccggaaggggtgcaggtatccaccgacatcgccagctatttaagcttcgttatggcgctgtttatggcgtttggtgtctcctttgaagtgccggtagcaattgtgctgctgtgctggatggggattaccagcccagaagacttacgcaaaaaacgcccgtatgtgctggttggtgcattcgttgtcgggatgttgctgacgccgccggatgtcttcagccaaacgctgttggcgatcccgatgtactgtctgtttgaaatcggtgtcttcttcagtcgcttttacgttggtaaagggcgaaatcgggaagaggaaaacgacgctgaagcagaaagcgaaaaaactgaagaataaattcaaccgcccgtcagggcggttgtcatatggagtacaggatgtttgatatcggcgttaatttgaccagtagccaatttgcgaaagaccgtgatgatgttgtagcgtgcgcttttgacgcgggagttaatgggctactcatcaccggcactaacctgcgtgaaagccagcaggcgcaaaagctggcgcgtcagtatagctcctgttggagtacggcgggcgtacatcctcacgacagcagccagtggcaagctgcgactgaagaagcgattattgagctggccgcgcagccagaagtggtggcgattggtgaatgtggtctcgactttaaccgcaactttagcacgccggaagagcaggaacgcgcttttgttgcccagctacgcattgccgcagatttaaacatgccggtatttatgcactgtcgcgatgcccacgagcggtttatgacattgctggagccgtggctggataaactgcctggtgcggttcttcattgctttaccggcacacgcgaagagatgcaggcgtgcgtggcgcatggaatttatatcggcattaccggttgggtttgcgatgaacgacgcggactggagctgcgggaacttttgccgttgattccggcggaaaaattactgatcgaaactgatgcgccgtatctgctccctcgcgatctcacgccaaagccaagttcccggcgcaacgagccagcccatctgccccatattttgcaacgtattgcgcactggcgtggagaagatgccgcatggctggctgccaccacggatgctaatgtcaaaacactgtttgggattgcgttttaaagtttgcggaactcggtattcttcacactgtgcttaatctctttattaataagattaagcaatagcatggagcgagcctcaccatcgggttcggtgaaaatggcctgaaagccttcgaacgcgccttcggtaataatcaccttatcacccggataaggggttgccggatcgacaatgtctttcggtttatatacgcttagctgatgaataaccgcgcttgggactatcgctgggctcgcgccaaagcgcacgaagtggctgacaccgcgggtcgcgttgatagtcgtggtatgaatcacttctgggtcaaattccacaaacaggtagttggggaacaatggctcactgactgcagtacgttttccacgcacgattttttccagggtgatcatcggtgccaggcaattcacagcctgtctttcgaggtgttcctgggcacgttgaagttgcccgcgcttgcagtacagtaaataccaggattgcataatgactcttatccgtttaatcggggcgcaaggatagcaaaagctttacgctaagttaattatattccccggtttgcgttataccgtcagagttcacgctaatttaacaaatttacagcatcgcaaagatgaacgccgtataatgggcgcagattaagaggctacaatggacgccatgaaatataacgatttacgcgacttcttgacgctgcttgaacagcagggtgagctaaaacgtatcacgctcccggtggatccgcatctggaaatcactgaaattgctgaccgcactttgcgtgccggtgggcctgcgctgttgttcgaaaaccctaaaggctacagtatgccggtgctgtgcaacctgttcggtacgccaaagcgcgtggcgatgggcatggggcaggaagatgttagcgcgctgcgtgaagttggtaaattattggcgtttctgaaagagccggagccgccaaaaggtttccgcgacctgtttgataaactgccgcagtttaagcaagtattgaacatgccgacaaagcggctgcgtggtgcgccctgccaacaaaaaatcgtctctggcgatgacgtcgatctcaatcgcattcccattatgacctgctggccggaagatgccgcgccgctgattacctgggggctgacagtgacgcgcggcccacataaagagcggcagaatctgggcatttatcgccagcagctgattggtaaaaacaaactgattatgcgctggctgagccatcgcggcggcgcgctggattatcaggagtggtgtgcggcgcatccgggcgaacgtttcccggtttctgtggcgctgggtgccgatcccgccacgattctcggtgcagtcactcccgttccggatacgcttagtgagtatgcgtttgccggattgctacgtggcaccaagaccgaagtggtgaagtgtatctccaatgatcttgaagtgcccgccagtgcggagattgtgctggaagggtatatcgaacaaggcgaaactgcgccggaagggccgtatggcgaccacaccggttactataatgaagtcgatagtttcccggtatttaccgtgacgcatattacccagcgtgaagatgcgatttaccattccacctataccgggcgtccgccagatgagcccgcggtgctgggtgtcgcactgaacgaagtgtttgtgccgattctgcaaaaacagttcccggaaattgtcgatttttacctgccgccggaaggctgctcttatcgcctggcggtagtgacaatcaaaaaacagtacgccggacacgcgaagcgcgtcatgatgggcgtctggagcttcttacgccagtttatgtacactaaatttgtgatcgtttgcgatgatgacgttaacgcacgcgactggaacgatgtgatttgggcgattaccacccgtatggacccggcgcgggatactgttctggtagaaaatacgcctattgattatctggattttgccagccctgtctccgggctgggtagtaaaatggggctggatgccacgaataaatggccgggggaaacccagcgtgaatggggacgtcccatcaaaaaagatccagatgttgtcgcgcatattgacgccatctgggatgaactggctatttttaacaacggtaaaagcgcctgatgcgcgtttgttttgccctatttatcgatccgacagagaaagcgcatgacaaccttaagctgtaaagtgaccagcgtagaagctatcacggataccgtatatcgtgtccgcatcgtgccagacgcggccttttcttttcgtgctggtcagtatttgatggtagtgatggatgagcgcgacaaacgtccgttcagtatggctagcacgccggatgaaaaagggtttatcgagctgcatattggcgcttctgaaatcaacctttacgcgaaagcagtcatggaccgcatcctcaaagatcatcaaatcgtggtcgacattccccacggagaagcgtggctgcgcgatgatgaagagcgtccgatgattttgattgcgggcggcaccgggttctcttatgcccgcagcattttgctgacagcgttggcgcgtaacccaaaccgtgatatcaccatttactggggcgggcgtgaagagcagcatctgtatgatctctgcgagcttgaggcgcttagcttgaagcatcctggtctgcaagtggtgccggtggttgaacaaccggaagcgggctggcgtgggcgtactggcaccgtgttaacggcggtattgcaggatcacggtacgctggcagagcatgatatctatattgccggacgttttgagatggcgaaaattgcccgcgatctgttttgcagtgagcgtaatgcgcgggaagatcgcctgtttggcgatgcgtttgcatttatctgagatataaaaaaacccgcccctgacaggcgggaagaacggcaactaaactgttattcagtggcatttagatctatgacgtatctggcaaaccatgcccgatgcgacgctgtcgcgtcttatcgtgcctacaaatagtccgaaccgtaggccggataaggcgtttacgccgcatccggcaattggtgcatgatgcctgatgcgacgctgtcgcgtcttatcgtgcctacaaatagtccgaaccgtaggccggataaggcgtttacgccgcatccggcaattggtgcatgatgcctgatgcgacgctggcgcgtcttatcaggcctacattggtgccggatcggtagaccggataaggcgttcacgccgcatccggcaagtggttaaacccgctcaaacaccgtcgcaataccctgacccagaccgatacacatcgtcgccagaccaaactgaacgtctttgcgttccatcagattcagcagcgtggtgctgatacgcgcaccggaacaacccagcggatgacccagcgcgatcgcgccaccgttgaggttgatcttctcgtcaatctgctcaattagtcccagatctttaatacatggcaggatctgcgcggcaaaggcttcgttcatttcaaacacgccgatatcgctggcagaaagccccgcttttttcagcgccagtttgctggccggaaccgggccgtaacccataatgcttgggtcacaaccaacgaccgccatgctacgcacacgagcgcgcggcttaagacctaattcatgggcgcggctttcactcatcaccagcatggcagctgcgccatcggaaagtgcagaagatgtgcccgccgttaccataccgtttactggatcaaacgccggacgcagcgtggcgagggcttccacggtggtttccgggcgaatcacttcgtcgtaattaaactgcttcaggacgccgtcggcatcgtgaccaccggtcgggatgatttcatttttaaatgcggcgctctgcgtggcggcccaggcgcgggcgtgactccgcgcggcaaaggcatcctgcatttcacggctgataccgtgcatacgcgccagcatttctgccgttaagcccatcatgcccgccgctttggcgacattgcggctcaggccggggtgaaaatcgacgccgtgactcatcggcacatggcccatatgctccacgccgccaaccagacatgcctgcgcatcgccagtcatgatcattcgtgctgcgtcatgcagtgcctgcatggaactaccacacaagcgattaacggtaaccgccgggacagagtgtggtacttctgccagcagcgccgcgttacgggcgatattaaaaccctgctccagcgtctgctgcacacaaccccagtaaatatcgtcgagggccgccgcttccagcgccgggttacgcgccagcaggctacgcattaaatgagcggagagatcttctgcacgcacgttacgaaaagcaccgcccttgctacggcccatcggggtgcgaattgcatcgacaatgacaacctgttccattgtgactccttaagccgttttcaggtcgccaaccggacgggctggctcaaccggaggatagtacggttcgttatgacgcgctttattacgcagaccttccggcacttcatacagcgggccgaggtgctgatattgctgtgccatatcgaggtattttgcgctaccgagggtgtccagccagcggaacgcgccgccgtggaacggagggaagcccaggccgtagaccagcgccatatccgcttccgccggagtggcgataatgccttcctccagacagcgcaccacttcgttgaccatcgggatcatcatgcgggcgataatctcttcttcgctgaaatcgcgcttcggctggctcacttctgccagcaggtcttcaacggcggcgtcttcttctttcttcggcttacctttgctgtcttctttataacgccagaaaccgaggccgttcttctgaccaaagcggttggcatcaaacagcgcgtcgatggcatcgcggtaatctttctgcatccgctgcgggaagcctgctgccatgacagcctgagcgtgatgcgcggtatcaatgcccacaacgtccagcagatatgccgggcccatcggccagccaaactgtttttccatcactttgtcgatcttgcggaaatccgcgccgtcgcgcagcagctggctgaaaccggcgaaatacgggaacagcacgcggttaacaaagaagccggggcagtcgttaaccacaatcggcgtcttgcccatcttgctcgcccaggcgacaactttcgcgatggtttcgtcggagcttttctcgccgcgaataatttctaccaacggcattcggtggaccgggttaaagaagtgcatcccgcagaagttttccgggcgttccagcgcgttggccagttcgctgataggaatggtactagtgttagacgccagcacggtatcctggcgtactttttgttcggtttctgccagtacggcttttttcactttcgggttttcaacaaccgcttctaccacaatatccacgcggtcaaatccggcgtagtcgagcgttgggtggattgtggagatcacgccagccagtttcagaccatcgatcttgccgcgctcaagctgcttgttcagcagtttcgcggcttcggtcatgccgagggttaagctcttgtcgttgatatctttcatgacaaccggcacgcctttccacgcagactggtaagcgatgccgccgcccataatgcctgcacccagcaccgcggcctgtttcggggtttcaacgtctttggtgagtttcttcgctttgccttttacatattgatcgttaaggaaaatgccgaccagtgcgcgggcttcgttggtatgcgccagcgggacaaaacttttgttttccaggtttaaggcttcttcacgaccaaaacgggccgcagcttcaatggtttttactgcggtgatgggggccggataatgtttccccgctgtttgtgcgaccatccctttagcgatggtgaagctcatggtggcttcaatcttgctcagttttagtggttccagcttcggctgacgttttgctttccagtcgaggtcgccgttaatggcctggcgtaaaaccgcctttgcgccttcaaccagtttttctgctttgactacgccatccaccagaccgattttcagcgcctgatccgcgccgacatctttaccggcggcaatgatttccagcgcactgtcagcgcccagcatacgtggcatacgtacagaaccgccaaagccaggcatgatgcccagtttggtttccggcagaccgatgcgcagatccggcgtcgccagacgataatcggtcgccagcacgcattcgcagccaccgcccagcgcatagccattgacggcagcaatggtcggcaccggcagatcttccaggcgattaaacacgctattggcaaagtgcagccactgacttaactgttcttcaggaacgaggaacagggacaaaaattcggtgatatcagcaccgacgataaaggctgctttgttgctacgcagcagcagcccttttagatcactttgctgttccagcacgccgatggcctcgccgaggctggcgacggtcgcagtgtcgagtttattaacactacctggggcatcaaataccagttcggcaatgccatcttccagccagtcaaggtacagggtgtcgcctttgtaaagcatgtcagtctcctgaatccgcaaggtgatctggtcgtaccagatgagtcgaagtgtgtattttgtgttaaaaatatgcaaacaaaagattaaagaaatgccgatctgatcacgctcggcagaaatcacgctctggatgaacgatgtgctaagatgcggagacttaaggtcaaaaaaacagaagggtaaaaaatggaaagtctggccagcctctataaaaatcatatagctaccttacaagaacggactcgcgatgcgctggcgcgcttcaagctggatgcgttacttattcactccggcgagctgttcaatgtttttctcgacgatcatccctatccgtttaaagtgaacccgcaattcaaagcgtgggtgccggtaactcaggtgccaaactgctggttgctggtggatggcgtgaacaagccgaaactgtggttctatctgccggttgattactggcacaacgtcgaaccgctgccgacctctttctggactgaagatgtggaagtgatcgcgctgccgaaagccgatggcattggtagcctgctgcctgctgcgcgcggcaatatcggttatatcggtccggtgccggaacgtgcgctgcaactgggtattgaggccagcaacatcaacccgaaaggggttatcgactacctgcattactatcgctccttcaaaactgagtacgaactggcctgtatgcgtgaagcgcagaaaatggcggtcaacggtcaccgcgcggcagaagaagcgttccgttctggcatgagcgagttcgatatcaacattgcctatctgaccgcgaccggtcatcgtgataccgacgtaccttacagcaacattgtggcgcttaacgaacacgctgcggtactgcattacaccaaactggaccatcaggcaccggaagagatgcgcagcttcctgctggatgccggggcagaatataacggctatgcggctgacctgacccgtacctggagcgcaaaaagtgacaacgactacgcgcagctggtgaaggacgttaatgatgaacaactggcgctgatcgccaccatgaaagcaggcgtcagctatgtggattaccacatccagttccatcagcgcatcgccaaactgctgcgtaaacatcaaatcatcaccgatatgagtgaagaagcgatggtcgaaaacgatcttaccgggccgtttatgccgcatggtatcggccatccgctgggcctgcaggtgcatgacgtcgctggttttatgcaggatgatagcggtacgcacctcgcggcaccggcaaaatatccgtacctgcgctgcacccgtattctccagccgggcatggtgttaaccatcgaaccgggtatctacttcatcgaaagcctactggcaccgtggcgtgaagggcagttcagcaagcacttcaactggcagaaaattgaagcactgaaaccgttcggcggcattcgtatcgaagacaacgtggtgatccacgaaaacaacgtggaaaacatgacccgggatctgaaactggcgtgatggaaagctggttaattcctgcggcaccggtcacggtcgttgaagagatcaaaaagagccgcttcataacgatgttggcgcataccgatggcgttgaggcggcgaaagcgtttgttgaaagcgtgcgggcagaacaccccgatgcccggcaccattgcgtggcgtgggtcgcgggtgcgccggatgattctcaacagctgggtttctctgacgacggggagccggcgggaacggcaggtaaaccgatgctcgcccagctaatgggcagcggcgtcggggaaattaccgctgtggtagtgcgctactacggcggcatattgcttggcaccggtgggttagtgaaagcgtatggcggcggcgtgaatcaggcgctgcgccagctaacgacccaacgcaagacgccattaaccgaatatactttgcaatgtgaatatcatcagttaaccggcattgaagcgttgctggggcagtgtgacggcaaaattatcaacagtgattatcaggcattcgttctgctgcgggtggcgcttccggcggcgaaagtggctgaattttccgcaaagctggcggattttagccgtggtagtttgcaattgttagcgattgaagaataatccccacttcgttttgcagaactaaggaagcggcagagatgcattttcgcgccattacccgaatcgttggactactggtcatcttatttagtgggaccatgattatccctgggctggtagcactcatctaccgggatggagcgggccgcgcttttacccagaccttttttgtcgccctcgccattggctctatgctgtggtggccgaaccgcaaagagaaaggcgaacttaaatcccgtgaggggtttctgatagtggtgctgttctggaccgtgctgggtagcgtcggtgcgctcccttttatcttcagcgaaagcccgaacctcacgattaccgatgcgttttttgaatctttctctggcctgaccactacgggagccactacgctggtggggctggatagcctccctcacgccatcctcttttatcgccagatgctgcaatggtttggcgggatggggatcatcgtgttggcggttgcgatactgcctatcctcggcgtgggtgggatgcagctctatcgcgcagaaatgcccggcccgctgaaagataacaaaatgcgcccgcgaattgcggaaacggcgaaaaccctgtggttgatttatgtcttgctgaccgtcgcctgtgcgctggcgttgtggtttgccggaatggatgcctttgatgccatcggccatagctttgcgactatcgctattggcggcttcagcacacatgatgccagtatcggttatttcgatagcccgactattaacactatcattgctatcttcctgctgatctccggctgtaactacggtctgcactttagtctgttaagtgggcgtagtctgaaggtttattggcgcgatccggaatttcgcatgtttatcggcgtacagtttacgctggtggttatttgtaccctcgtactgtggtttcataatgtctacagtagcgcgctgatgacaattaaccaggcgtttttccaggtggtgagcatggcgacaaccgccgggtttacaactgacagcattgcccgctggccgctctttttgccggtactgcttttatgtagtgcctttatcggcggttgcgccgggagtacgggcggtggcctgaaggtgatccgcatcctgctgctgtttaagcaggggaaccgtgagctgaaacgactggtgcatccgaacgccgtctatagcattaagctggggaatcgcgcactgccggaacgtatcctcgaagccgtttggggatttttctccgcctatgcattggtgtttattgtcagtatgctggcgattatcgccacgggcgtggatgacttttctgcctttgcgagcgttgttgcgacattgaataacctggggccagggcttggcgtggttgctgataactttaccagtatgaacccggtggctaaatggatcctgattgccaacatgctgtttggtcgtctcgaggtctttacattgctggtgctctttaccccgactttctggcgtgaatgatggagtaatacgtgaaaacattaattcttttcagtacaagggacggacaaacgcgcgagattgcctcctacctggctagcgaactgaaagaactggggatccaggcggatgtcgccaatgtgcaccgcattgaagaaccacagtgggaaaactatgaccgtgtggtcattggtgcttctattcgctatggtcactaccatagtgcgttccaggaatttgtcaaaaaacatgcgacgcggctgaatagcatgccgagcgccttttactccgtgaatctggtggcgcgcaaaccggagaagcgtactccacagaccaacagctacgcgcgcaagtttctgatgaacagccaatggcgtcccgatcgctgcgcggtcattgccggggcgctgcgttacccacgttatcgctggtacgaccgttttatgatcaagctgattatgaagatgagtggcggtgaaacggatacgcgcaaagaagttgtctataccgattgggagcaggtggcgaatttcgcccgagaaatcgcccatttaaccgacaaaccgacgctgaaataagcataaagaataaaaaatgcgcggtcagaaaattattttaaatttcctcttgtcaggccggaataactccctataatgcgccaccactgacacggaacaacggcaaacacgccgccgggtcagcggggttctcctgagaactccggcagagaaagcaaaaataaatgcttgactctgtagcgggaaggcgtattatgcacaccccgcgccgctgagaaaaagcgaagcggcactgctctttaacaatttatcagacaatctgtgtgggcactcgaagatacggattcttaacgtcgcaagacgaaaaatgaataccaagtctcaagagtgaacacgtaattcattacgaagtttaattctttgagcgtcaaacttttaaattgaagagtttgatcatggctcagattgaacgctggcggcaggcctaacacatgcaagtcgaacggtaacaggaagaagcttgcttctttgctgacgagtggcggacgggtgagtaatgtctgggaaactgcctgatggagggggataactactggaaacggtagctaataccgcataacgtcgcaagaccaaagaggggtaccttcgggcctcttgccatcggatgtgcccagatgggattagctagtaggtggggtaacggctcacctaggcgacgatccctagctggtctgagaggatgaccagccacactggaactgagacacggtccagactcctacgggaggcagcagtggggaatattgcacaatgggcgcaagcctgatgcagccatgccgcgtgtatgaagaaggccttcgggttgtaaagtactttcagcggggaggaagggagtaaagttaatacctttgctcattgacgttacccgcagaagaagcaccggctaactccgtgccagcagccgcggtaatacggagggtgcaagcgttaatcggaattactgggcgtaaagcgcacgcaggcggtttgttaagtcagatgtgaaatccccgggctcaacctgggaactgcatctgatactggcaagcttgagtctcgtagaggggggtagaattccaggtgtagcggtgaaatgcgtagagatctggaggaataccggtggcgaaggcggccccctggacgaagactgacgctcaggtgcgaaagcgtggggagcaaacaggattagataccctggtagtccacgccgtaaacgatgtcgacttggaggttgtgcccttgaggcgtggcttccggagctaacgcgttaagtcgaccgcctggggagtacggccgcaaggttaaaactcaaatgaattgacgggggcccgcacaagcggtggagcatgtggtttaattcgatgcaacgcgaagaaccttacctggtcttgacatccacggaagttttcagagatgagaatgtgccttcgggaaccgtgagacaggtgctgcatggctgtcgtcagctcgtgttgtgaaatgttgggttaagtcccgcaacgagcgcaacccttatcctttgttgccagcggtccggccgggaactcaaaggagactgccagtgataaactggaggaaggtggggatgacgtcaagtcatcatggcccttacgaccagggctacacacgtgctacaatggcgcatacaaagagaagcgacctcgcgagagcaagcggacctcataaagtgcgtcgtagtccggattggagtctgcaactcgactccatgaagtcggaatcgctagtaatcgtggatcagaatgccacggtgaatacgttcccgggccttgtacacaccgcccgtcacaccatgggagtgggttgcaaaagaagtaggtagcttaaccttcgggagggcgcttaccactttgtgattcatgactggggtgaagtcgtaacaaggtaaccgtaggggaacctgcggttggatcacctccttaccttaaagaagcgttctttgaagtgctcacacagattgtctgatgaaaatgagcagtaaaacctctacaggcttgtagctcaggtggttagagcgcacccctgataagggtgaggtcggtggttcaagtccactcaggcctaccaaatttgcacggcaaatttgaagaggttttaactacatgttatggggctatagctcagctgggagagcgcctgctttgcacgcaggaggtctgcggttcgatcccgcatagctccaccatctctgtagtgattaaataaaaaatacttcagagtgtacctgcaaaggttcactgcgaagttttgctctttaaaaatctggatcaagctgaaaattgaaacactgaacaacgaaagttgttcgtgagtctctcaaattttcgcaacacgatgatgaatcgaaagaaacatcttcgggttgtgaggttaagcgactaagcgtacacggtggatgccctggcagtcagaggcgatgaaggacgtgctaatctgcgataagcgtcggtaaggtgatatgaaccgttataaccggcgatttccgaatggggaaacccagtgtgtttcgacacactatcattaactgaatccataggttaatgaggcgaaccgggggaactgaaacatctaagtaccccgaggaaaagaaatcaaccgagattcccccagtagcggcgagcgaacggggagcagcccagagcctgaatcagtgtgtgtgttagtggaagcgtctggaaaggcgtgcgatacagggtgacagccccgtacacaaaaatgcacatgctgtgagctcgatgagtagggcgggacacgtggtatcctgtctgaatatggggggaccatcctccaaggctaaatactcctgactgaccgatagtgaaccagtaccgtgagggaaaggcgaaaagaaccccggcgaggggagtgaaaaagaacctgaaaccgtgtacgtacaagcagtgggagcacgcttaggcgtgtgactgcgtaccttttgtataatgggtcagcgacttatattctgtagcaaggttaaccgaataggggagccgaagggaaaccgagtcttaactgggcgttaagttgcagggtatagacccgaaacccggtgatctagccatgggcaggttgaaggttgggtaacactaactggaggaccgaaccgactaatgttgaaaaattagcggatgacttgtggctgggggtgaaaggccaatcaaaccgggagatagctggttctccccgaaagctatttaggtagcgcctcgtgaattcatctccgggggtagagcactgtttcggcaagggggtcatcccgacttaccaacccgatgcaaactgcgaataccggagaatgttatcacgggagacacacggcgggtgctaacgtccgtcgtgaagagggaaacaacccagaccgccagctaaggtcccaaagtcatggttaagtgggaaacgatgtgggaaggcccagacagccaggatgttggcttagaagcagccatcatttaaagaaagcgtaatagctcactggtcgagtcggcctgcgcggaagatgtaacggggctaaaccatgcaccgaagctgcggcagcgacactatgtgttgttgggtaggggagcgttctgtaagcctgtgaaggtgtgctgtgaggcatgctggaggtatcagaagtgcgaatgctgacataagtaacgataaagcgggtgaaaagcccgctcgccggaagaccaagggttcctgtccaacgttaatcggggcagggtgagtcgacccctaaggcgaggccgaaaggcgtagtcgatgggaaacaggttaatattcctgtacttggtgttactgcgaaggggggacggagaaggctatgttggccgggcgacggttgtcccggtttaagcgtgtaggctggttttccaggcaaatccggaaaatcaaggctgaggcgtgatgacgaggcactacggtgctgaagcaacaaatgccctgcttccaggaaaagcctctaagcatcaggtaacatcaaatcgtaccccaaaccgacacaggtggtcaggtagagaataccaaggcgcttgagagaactcgggtgaaggaactaggcaaaatggtgccgtaacttcgggagaaggcacgctgatatgtaggtgaagcgacttgctcgtggagctgaaatcagtcgaagataccagctggctgcaactgtttattaaaaacacagcactgtgcaaacacgaaagtggacgtatacggtgtgacgcctgcccggtgccggaaggttaattgatggggttagccgcaaggcgaagctcttgatcgaagccccggtaaacggcggccgtaactataacggtcctaaggtagcgaaattccttgtcgggtaagttccgacctgcacgaatggcgtaatgatggccaggctgtctccacccgagactcagtgaaattgaactcgctgtgaagatgcagtgtacccgcggcaagacggaaagaccccgtgaacctttactatagcttgacactgaacattgagccttgatgtgtaggataggtgggaggctttgaagtgtggacgccagtctgcatggagccgaccttgaaataccaccctttaatgtttgatgttctaacgttgacccgtaatccgggttgcggacagtgtctggtgggtagtttgactggggcggtctcctcctaaagagtaacggaggagcacgaaggttggctaatcctggtcggacatcaggaggttagtgcaatggcataagccagcttgactgcgagcgtgacggcgcgagcaggtgcgaaagcaggtcatagtgatccggtggttctgaatggaagggccatcgctcaacggataaaaggtactccggggataacaggctgataccgcccaagagttcatatcgacggcggtgtttggcacctcgatgtcggctcatcacatcctggggctgaagtaggtcccaagggtatggctgttcgccatttaaagtggtacgcgagctgggtttagaacgtcgtgagacagttcggtccctatctgccgtgggcgctggagaactgaggggggctgctcctagtacgagaggaccggagtggacgcatcactggtgttcgggttgtcatgccaatggcactgcccggtagctaaatgcggaagagataagtgctgaaagcatctaagcacgaaacttgccccgagatgagttctccctgactccttgagagtcctgaaggaacgttgaagacgacgacgttgataggccgggtgtgtaagcgcagcgatgcgttgagctaaccggtactaatgaaccgtgaggcttaaccttacaacgccgaaggtgttttggcggattgagagaagattttcagcctgatacagattaaatcagaacgcagaagcggtctgataaaacagaatttgcctggcggcagtagcgcggtggtcccacctgaccccatgccgaactcagaagtgaaacgccgtagcgccgatggtagtgtggggtctcctcatgcgagagtagggaactgccaggcatcaaataaaacgaaaggctcagtcggaagactgggcctttcgttttatctgttgtttgtcggtgaacgctctcctgagtaggacaaatccgccgggagcggatttgaacgttgcgaagcaacggcccggagggtggcgggcaggacgcccgccataaactgccaggcatcaaattaagcagaaggccatcctgacggatggcctttttgcattggcgcagaaaaaaatgccggatgcgacgctggcgcgtcttatccagcctactcttgcttatccgttctgcttttgcatccactccaccacaaaatcagccagcccctcaacatcattaatatccagtaatgcgacatcaagattaagcggcacatcactggctacagcaataacatgcctgtctatcactaattcttcaggtcgatgtccggctccatcgcgaaacagcacaatctttgcgatctcttcatgcttaaacccttcgaccagaatcaaatccagcttactggtatccattcgacttgcgagaaactgtagatccagctcttcttcgtctggtgtttccgtcatcaaggcccatcgttgctggctggcaacgatggtttgtgccgcgccagccttgcgcagctcatagctatctttgcctggcttatcaacatccatatcatggtgcgtatgcttaatcagccctggacggatccctctggcgcataatgccgggatcagttttttcaaaagcgtagtttttccggtaccactccacgcggcaaaggcgagtaacggtatcatcgtttttcctgccatcgggcaagctcctctggcgtattcacgttaacaaatgcatctttatgatcgctgaaatcaaccgcatgaccgccagccagacgcataaataccattacccggcgttctcctgcttgcagatattccagtaataaaggctcaatagcgcggtttaccagagcaatagtcgggtgatcgcgttcaccgtcatggacccacacgacaggcgcatctttgcgctgatgattaagcctggctgctaaatcagggggaatgtaaggcgtatcgcacgggcaaaacaaaaaccactcaccagcttcctgctgcattacactaagcattcctgccagagggcctgggtaatccgccagactatcttcaatcactttcagaccgcttgcctgatagatttcctgatgacgattagcattaaccacgacgtgagagagctgcgtcataagcgcgtcagcgacatgttgccataatggtttgccgtttaattcaagcaatcctttatctacgccgcccattcgtctggctttaccgcctgccagcacaacgcctgttatcgtcgtcatcagattcaccgatatcgcctcttttattgtgggattgaccctgctaacgtgtctgtctcaagagtaaggagcatcactatgaaatgtaaacgtctgaatgaagttattgaactcctccagccagcctggcaaaaagagccagaccttaacctgctgcaatttttgcagaaactggcgaaagagagtggttttgacggcgaactggcggatttgacggatgacattctgatctatcacctgaaaatgcgtgattccgcgaaagatgcggtgatcccgggtttgcagaaagattatgaagaagacttcaaaacggcgctgttacgcgctcgcggcgtaattaaagagtaaaagcttgtaagcggcgccaccaaaatcatcgtgaaatgatatccttcgtcattcgtaatgttttccggatgatgggatgaataacagcgcttttactttccagacactacacccggataccatcatggacgctctgtttgagcatgggatccgggtggattccggtcttaccccgcttaacagctatgaaaaccgtgtctatcaatttcaggacgaagatcgtcgacgttttgtcgtcaaattttatcgccctgaacgttggacagccgatcaaatcctcgaagaacatcaatttgcgttgcagctggtaaatgatgaagttccggtcgcagcacctgtggcctttaacggtcagactttattgaatcatcagggattttatttcgctgtttttccaagcgtcggtggtcgccagttcgaagctgataatatcgatcagatggaagcggttgggcgttatttagggcgtatgcaccagacggggcgcaaacagctttttatccatcgcccgaccatcggtttgaacgaatatctcattgagccacgcaagctgtttgaggacgctacactgataccttccgggttgaaagcggcattcctgaaagcgacagatgagctgattgccgccgttacagcacactggcgggaagatttcaccgttctgcggctacatggagactgccacgccgggaatattctctggcgcgatggtccaatgtttgttgatctggatgatgcacgtaatggtccagccgttcaggatttgtggatgttgctcaatggcgataaagccgagcagcggatgcaactggaaactattattgaagcttatgaagaatttagcgagttcgacaccgctgaaatcggactgattgaacctttacgcgccatgcgtttggtttattatcttgcctggctaatgcggcgttgggctgatcccgcgttcccgaaaaatttcccgtggttaaccggggaagattactggctgcgacagacggcgacttttatagaacaggcaaaagttctacaagaaccccctttgcaattaacacctatgtattaatcggagagagtagatcatgaaaaagatttggctggcgctggctggtttagttttagcgtttagcgcaagcgcggcgcagtatgaagatggtaaacagtacactaccctggaaaaaccggtagctggcgcgccgcaagtgctggagtttttctctttcttctgcccgcactgctatcagtttgaagaagttctgcatatttctgataatgtgaagaaaaaactgccggaaggcgtgaagatgactaaataccacgtcaacttcatgggtggtgacctgggcaaagatctgactcaggcatgggctgtggcgatggcgctgggcgtggaagacaaagtgactgttccgctgtttgaaggcgtacagaaaacccagaccattcgttctgcttctgatatccgcgatgtatttatcaacgcaggtattaaaggtgaagagtacgacgcggcgtggaacagcttcgtggtgaaatctctggtcgctcagcaggaaaaagctgcagctgacgtgcaattgcgtggcgttccggcgatgtttgttaacggtaaatatcagctgaatccgcagggtatggataccagcaatatggatgtttttgttcagcagtatgctgatacagtgaaatatctgtccgagaaaaaataattcaatgtaaattacataaagcccgtgaatattcacgggctttttttattatttaataaatataaatacattctgataatgcatcctgccgctggacattatttcagcataagtggatattcaaagttttgctgttttatcagggaatatttatatgatacgtaagagtgctacaggtgttattgttgcgttagccgtaatctggggtggtggcacatggtacacaggtacgcaaattcagcctggtgtcgaaaaatttattaaagattttaacgatgctaaaaagaaaggtgaacatgcctacgatatgacgttaagttatcaaaattttgacaaaggcttttttaattcccgttttcaaatgcaaatgacattcgataacggtgcacccgatctcaatatcaagccaggccagaaagttgtatttgatgtggatgttgagcacggtccgttgcccatcacaatgttaatgcatggtaatgtcatcccagcactggcagcggcaaaagtgaacttagtgaataatgaactgacacaaccgctatttatcgccgcgaaaaataaaagccccgtggaagcgacattgcgattcgcgtttggtggcagtttctctacgacattagatgttgcccctgcagagtatggaaagttttcttttggtgagggccagtttacttttaatggtgatggtagtagtttgtctaacctggatattgaaggcaaagtcgaagatattgttctgcaattaagtccaatgaacaaagtaacggcaaaaagttttaccattgattctctggcgcgattagaagaaaagaaatttccggttggtgaaagcgagagcaaatttaatcagattaacattatcaatcacggggaagacgttgcccaaatcgatgctttcgttgcaaaaaccaggctggatcgcgttaaagacaaagattatatcaatgtcaatctcacctacgaacttgataagttaacaaaagggaatcagcaactcggtagtggtgagtggagtttgattgctgaatctattgatcccagtgcagtgcgccaatttatcatccagtataacattgcgatgcagaagcagcttgctgcacaccctgagttagcaaacgatgaagttgctctgcaagaagtgaatgctgcattgttcaaagagtatttaccgttattacaaaaaagtgagccgaccattaaacaaccggtaagatggaagaacgcactcggcgaactaaatgccaatctggatatcagtattgccgacccagccaaatctagtagttccacaaacaaagatatcaaaagcctcaattttgatgtgaagttaccgcttaatgtcgtcacagaaaccgcaaaacagcttaatttatctgaaggaatggatgcggaaaaagcgcaaaagcaggctgataaacaaatcagcgggatgatgacattaggtcagatgtttcagttaatcacgattgacaacaataccgccagcctgcagctgcgttatacaccgggtaaagttgtttttaacggacaggagatgagcgaagaagaatttatgtctcgtgccggacgttttgttcattaaaatactcactcgcctctgctcattcagaggcgagtaaaacttacttattctgacgctgactactcatgagagacgtcagaagccggtctttttcctgccacaaactgttcagccattgctgaaaatggcgcttaaagcttttgtcattgatgtagtcgccatgtaactcatcggcaataggctgtaaatccacatgtacgacaatccgcgtcagtttaccgcttaacatatcgaagaacggctgacggttattgtccggataacacagcgtaacattaagcagtttatcgaattgtttacccagtacatttagcgccatcgcaatgcctgccgcctttggtggcaacaagttttgaaaagtggagtgggtttgctgatgtttttcttgcgtgaaacgggagccttcaacgaaattgacaatggtggtgggatgcaggcgaaacttttcacaagaacgccgagtggtttcaacatctttaccacgtcgctccggatgacgtaataaataagcgcgggaataacgcttcataaacggcatatccaggctccagcacgccaggccaagaaatggcacccaggccagctgttgcttgaggaaatatttattcatcggaatgtgcttacgaaacagcacgcacagtacgacaatatctgcccaactacggtggttacaaataagcagataccagttcttcttacttaacccttccagcccgtgaacttcccattgaaggtgtgggttcagatgcagtaataccgccagaccttcacaccagcaatacatcataaaatcacaaaaacggctaacctttcgccaaatgactggcacaggtagcaatagttttacaatcccggcaatgatgatcgggacggaacaaaaaatagtgaccaaaatggtcaatacgatactcagcaaaagggttatcgcagcgagtattctcgtcataatgaatttattcaaaaggttagccatagacagtgcgctaaagaagcgcaaggcgcagattttagcagaaaacgacccaaataacggatgatccttaaggagaaaaataattcatatctatccacattagaaaaaatcccattatctcaattattagggatggatttatttttaactgcatgaaaaacaaagacaaacatcatgctgtaaaaagcatgataataaattaaaagcgatgtaaataatttatgcacaaagttatccacatgacgatttgcgagcgatccagaagatctacaaaagattttcacgaaaagcggtgaaaaactcatgttttcatcctgtctgtggcatcctttacccataatctgataaacaggcacggacattatggttcagatcccccaaaatccacttatccttgtagatggtagttcttatctttatcgcgcatatcacgcgtttcccccgctgactaacagcgcaggcgagccgaccggtgcgatgtatggtgtcctcaacatgctgcgcagtctgatcatgcaatataaaccgacgcatgcagcggtggtctttgacgccaagggaaaaacctttcgtgatgaactgtttgaacattacaaaagtcatcgcccgccaatgccggacgatctgcgtgcacaaatcgaacccttgcacgcgatggttaaagcgatgggactgccgctgctggcggtttctggcgtagaagcggacgacgttatcggtactctggcgcgcgaagccgaaaaagccgggcgtccggtgctgatcagcactggcgataaagatatggcgcagctggtgacgccaaatattacgcttatcaataccatgacgaataccatcctcggaccggaagaggtggtgaataagtacggcgtgccgccagaactgatcatcgatttcctggcgctgatgggtgactcctctgataacattcctggcgtaccgggcgtcggtgaaaaaaccgcgcaggcattgctgcaaggtcttggcggactggatacgctgtatgccgagccagaaaaaattgctgggttgagcttccgtggcgcgaaaacaatggcagcgaagctcgagcaaaacaaagaagttgcttatctcagttaccagctggcgacgattaaaaccgacgttgaactggagctgacctgtgaacaactggaagtgcagcaaccggcagcggaagagttgttggggctgttcaaaaagtatgagttcaaacgctggactgctgatgtcgaagcgggcaaatggttacaggccaaaggggcaaaaccagccgcgaagccacaggaaaccagtgttgcagacgaagcaccagaagtgacggcaacggtgatttcttatgacaactacgtcaccatccttgatgaagaaacactgaaagcgtggattgcgaagctggaaaaagcgccggtatttgcatttgataccgaaaccgacagccttgataacatctctgctaacctggtcgggctttcttttgctatcgagccaggcgtagcggcatatattccggttgctcatgattatcttgatgcgcccgatcaaatctctcgcgagcgtgcactcgagttgctaaaaccgctgctggaagatgaaaaggcgctgaaggtcgggcaaaacctgaaatacgatcgcggtattctggcgaactacggcattgaactgcgtgggattgcgtttgataccatgctggagtcctacattctcaatagcgttgccgggcgtcacgatatggacagcctcgcggaacgttggttgaagcacaaaaccatcacttttgaagagattgctggtaaaggcaaaaatcaactgacctttaaccagattgccctcgaagaagccggacgttacgccgccgaagatgcagatgtcaccttgcagttgcatctgaaaatgtggccggatctgcaaaaacacaaagggccgttgaacgtcttcgagaatatcgaaatgccgctggtgccggtgcttagtcgcattgaacgtaacggtgtgaagatcgatccgaaagtgctgcacaatcattctgaagagctcacccttcgtctggctgagctggaaaagaaagcgcatgaaattgcaggtgaggaatttaacctttcttccaccaagcagttacaaaccattctctttgaaaaacagggcattaaaccgctgaagaaaacgccgggtggcgcgccgagtacgagcgaagaggtactggaagaactggcgctggactatccgttgccaaaagtgattctggagtatcgtggtctggcgaagctgaaaagcacctacaccgacaagctgccgctgatgatcaacccgaaaaccgggcgtgtgcatacctcttatcaccaggcagtaactgcaacgggacgtttaagcagtaccgatcctaacctgcaaaacattccggtgcgtaacgaagaaggtcgtcgtatccgccaggcgtttattgcgccagaggattatgtgattgtcagtgcggactacagccagattgaactgcgcattatggcgcatcttagccgtgacaaaggcttgctgaccgcattcgcggaaggaaaagatatccaccgggcaacggcggcagaagtgtttggtttgccactggaaaccgtcaccagcgagcaacgccgtagcgcgaaagcgatcaactttggtctgatttatggcatgagtgctttcggtctggcgcggcaattgaacattccacgtaaagaagcgcagaagtacatggacctttacttcgaacgctaccctggcgtgctggagtatatggaacgcacccgtgctcaggcgaaagagcagggctacgttgaaacgctggacggacgccgtctgtatctgccggatatcaaatccagcaatggtgctcgtcgtgcagcggctgaacgtgcagccattaacgcgccaatgcagggaaccgccgccgacattatcaaacgggcgatgattgccgttgatgcgtggttacaggctgagcaaccgcgtgtacgtatgatcatgcaggtacacgatgaactggtatttgaagttcataaagatgatgttgatgccgtcgcgaagcagattcatcaactgatggaaaactgtacccgtctggatgtgccgttgctggtggaagtggggagtggcgaaaactgggatcaggcgcactaagattcgcctgaacatgccttttttcgtaagtaagcaacataagctgtcacgttttgtgatggctattagaaattcctatgcaacaactgaaaaaaaattacaaaaagtgctttctgaactgaacaaaaaagagtaaagttagtcgcgtagggtacagaggtaagatgttctatctttcagaccttttacttcacgtaatcggatttggctgaatattttagccgccccagtcagtaatgactggggcgttttttattgggcgaaagaaaagatccgtaatgcctgatgcgctatgtttatcaggccaacggtagaattgtaatctattgaatttacgggccggatacgccacatccggcacaagcattaaggcaagaaaattattcgccgtcctgcgtttcttctacaggctgcatctcgctaaaccaggtatccagtttctgccgcagcttgtccacgccttgtttcttcaagctagaaaacgtttcaacctgcacatcaccgttaaacgccagtacagcttcacgcaccatattcaattgcgctttacgtgcgccgcttgccagtttgtccgctttggtcagcagcaccagaacggcgatattgctgtctaccgcccactcaatcatctgctgatccaaatctttcagcggatggcgaatatccattagcaccaccagaccttgcaggctctgacgtttttcgaggtattcgccgagcgcacgctgccatttgcgcttcatctcttccgggacttccgcataaccgtacccaggcaagtcaaccagacgcttgccgtcagccacttcaaacaggttgataagctgggtgcgccctggggttttactggtacgagccaggcttttctggttagtcagcgtgttcagcgcgctggatttacctgcgttggaacggcctgcaaaagccacttcaattccggtatcggaaggtaggtggcgaatatcaggcgcactcatcacaaaatgcgtctgttgataattcaaattagtcaaagcggtcgtctccgtcagtcaaagctttgtggcgattatacctgaaccataataaaaggcggatttttcggcgtgagcgttgtaagtaaaagccatacgctttgtgagacattgccgatagtctttatgcgaaatagcagagaaaattctgcgatgcatgtcaaataagctatataaatcagtgaattgcttttatataaaactctgaaaatgtgcaaatactgatggcggttgattgtttgtttaaagcaaaggcgtaaagtagcacccatagagcgaggacgctaacaggaacaatgactcaggatgagggtcaggagcgccaggaggcgaagacagaggattgtcaggaagacaaacgtccggagacgtaattaaacggaaatggaatcaacacggattgttccggctaaaggaaaaacagggtgtgttggcggcctgcaaggattgtaagacccgttaagggttatgagtcaggaaaaaaggcgacagagtaatctgtcgccttttttctttgcttgctttctgttagattccgccgcaaatctatactgaataaaacggctaaaagacgaaccattatgaaaccaagttctagtaacagtcgcagcaaaggtcatgcaaaagcgcgtcgaaaaacacgcgaggagctggatcaggaagctcgtgatcgcaagcgtcagaaaaaacgtcgtggtcatgcgccgggcagccgcgcagcgggcggaaacaccacgagtggcagcaaaggccagaacgcaccaaaagatccacgtattggcagtaaaacccctattccattgggcgtgactgaaaaagtcaccaaacagcacaaaccgaagagtgagaaacctatgcttagtccgcaggcggagttggaattactggaaacggatgagcgtctggatgcgctgctggaacgtctggaagcaggcgaaaccctgagtgccgaagagcaatcctgggtggatgctaaactggatcgtattgatgagttgatgcagaaactcggcctctcttatgacgatgacgaagaagaggaagaagacgagaagcaagaagacatgatgcgtctgctgcggggcaactaacggattgccgccgtgggccttcccgttctgctgataacccttccggttatatgttatctggtgtggttattcgttaaactacagcggttgtcgcggcgacaaaagtggctgcgcaaccggctgatgacccgaaacgggcatccgccggtacgccgtagccgccagagacgccatcggaaggagtgagcatgtctgtacagcaaatcgactgggatctggccctgatccagaaatataactattccgggccacgatacaccagctacccgaccgcgctggagtttagtgaagacttcggcgaacaggcgtttttacaagccgtggcgcgctatcctgagcgtccattatctctctacgtacatatcccgttctgccataagctttgttacttctgcggttgcaataagattgttactcgccagcagcacaaggccgatcagtatctggacgcgctggagcaagaaatcgtccatcgtgcaccgctgttcgccgggcgtcacgtcagccaattgcactggggcggcggaacgccgacgtatctgaataaagcgcaaatcagccgcctgatgaagctgctgcgcgaaaacttccagttcaatgccgatgcggagattagcatcgaagtcgatccgcgggaaatcgaactggatgtactcgatcatttacgcgccgaaggctttaatcgcctgagcatgggcgtgcaggacttcaacaaagaagtgcaacgtctggttaaccgcgagcaggatgaagagttcatctttgcactgcttaaccatgcgcgtgagattggttttacctccaccaacatcgacctgatttacggcctgccgaaacagacgccggagagtttcgcctttaccctgaaacgtgtggcggagctgaaccccgatcgtctgagtgtctttaactacgcgcatctgccgaccatttttgctgctcagcgcaaaatcaaagatgctgacctgccgagtccgcagcaaaaactcgatatcctgcaggaaaccatcgccttcctgacgcaaagcggctatcagtttatcggtatggatcactttgcccgtccggatgacgagctggcggtggcccagcgtgaaggcgtgctgcatcgtaacttccagggctacaccactcagggcgataccgatctgctggggatgggcgtttccgccatcagcatgattggcgactgctacgcgcagaaccagaaagagttgaagcagtactatcagcaagtggatgaacaaggcaatgcgctgtggcgtggtattgcgctaacgcgtgatgactgtattcgccgcgatgtgattaagagcctcatctgcaacttccgtctggattacgcccctattgagaaacagtgggatttgcacttcgctgattactttgcggaagatctcaagctgctcgccccgttagcaaaagatgggctggtggatgtggatgagaagggaatacaggtgacggcgaaaggtcgcttgctgatccgcaacatttgcatgtgctttgatacctatctgcgccagaaagcgcggatgcagcagttctctcgggtgatttaaatagtgaatggcgcttcgtttacaaagtagaaaacgaaagcgccatcaatgtgctgagaacaagattgcctgatgcgctgggcaacaaaacctgttgaaattattgcttttgtaggccggataaggcgtttacgccgcatcaggcatctgagcatgatgcctgatgcggcgctggtcgcgtcttatcaggcctacgactttctccgcatccggcataaacaacgagcttcagctaaacagcccaatcattgcggcacacagcacggcagcaacggcagtttgcggtgtgtggctgtcaactgcgccactcgataccagattaattattgattccagcataatgactctccccgttttccgggcaagatcatactgaacttatcggaacagtaaagcgtaaaataccagcaatttgcgctcaataatcaatctttacacacaagctgtgaatcactccatccccagctcttttaacttacgcgtcagggtgttgcggccccagccgagtagccgcgccgcttcctgtttatgcccctgcgtatgtcgcaacgcggtcgtcagtaacgtccgctccagctctggctgcgcttcggaaagcagattttgatgaccggaacgcagcgctctgtctgcccactgcgcaagaagcgtcgcccagctgtccggttgcatttggctagtactctccgcaaccgtactttcaaacagttcgccgggcaaatcctgaatcaacacttcctgcccggcggccatcaccgttagccagcggcaggtgttttccagctggcgcacgttgcctggccacgccagacgcgtcagagcagcttcggtttccggatgcagtaacttcgcttctacgcccagttcgcgcgcggcaacctgtaaaaaatggcgcgccagacggggaatatcttcccgacgttcgcgcagcggcggcagatgaacgcggataacgttcaggcggtggaacagatcctcacggaacttaccttcctgcactcgctgttcgagattctggtgagtggcagcgataatccgcacatccactttcaccggcgcatagccgccaacgcggtaaaactgaccgtctgccagcacgcgcagcaaacgcgtctgcacatccagcggcatatcaccaatttcgtcgaggaataatgtaccgccatcggcctgttcaaaacgcccctgacgaatggtattcgcgccagtaaacgcgcctttctcgtggccaaacagttcactttcgatcaaatcttttgggatagctgccatattcagcgcgataaacggcgctttggcgcgcggactgtggcgatgcagggcatgagcgaccagttctttaccggtgccggattcgccgttaatcagcacgctaatagaagaacggctaagccgaccgataatacggaacacgtcctgcatggctggcgcttcgccgatgatatcggtcgttgggccgttaagctgaacattacgcggctgctgctgttcctggtaatgactgatagcgcgctcaaccagcgccactgcttcgtcgatatcaaacggtttgggcagataatcaaacgccccttgttgataggcgctgacggcagcatccagatcggaatgtgcggtcataatgatgaccggaagcattggatggcgctgtttaatctgcttgagcagcgccagcccgtccattcccggcatacggatatcactaagcagcacatccggcgttttgctcgccagcgcctccagcacttctgcgccgttctcaaacgtcgtacaggttaaacctgccccagcgagcgcacgttcaagcacccaacggatggaactatcgtcatcgactacccagactatccctcgttgcataaacgtcacctttatttcctgataggcaggtaaacgctgaactcggtatgccctggccaactggtaaattcaattttgccactatgctgatcaatcaaattacgagcgatggataagccaagcccggtgccaccttcgcggccgctgaccatcgggtaaaacagcgtatcctgcaaatgaggcggaatgcccggcccgttatcttccacatcaatccgcgccgccagccggtagcgctcgccgtgtaaggtcagttgaaacgcggtgcgggtacgcagaatgatttcaccgccttccggccccagcgcctgtagcgcattgcgcacaatattcagcaagacctgttcaatttgatccgggtcgtgcgccagttccggtaggctgggatcgtaatcacgaatcaaccgcacgttgtccggcagttccatgctcaccagcgttaccacgcgttcagccactttgtgaatactttcggtaacgcgcgtaccgggcagctgcggccccaacagacggtcgaccagatttcgcagccggtccgcctgttcgataatcactttggtatattcgagtagacttgggtcaggtaacgctttgctgagcagctgcgccgcgccacgtaaaccgccaagcggatttttaatctcatgtgccaggccgcgcactaaatcacgggcagcaacctgctgggcgtgctgtagctgttcctgacttaagcggcgctggttatccatcggagccatctccagcaggatcatgccgtccggcatacgctgggccgtcacagaaaggatatggctgcgcccgtcgatgaccagcgtcacttcgttatcggtaaaaccttgccccgcctccagactttcttgcatcagctcgatatttaaactgaagtagctcaacagttccggtaacggtgtaccaaacaatttgcgggagctttgggcgagcagttgttgcgcggcagggttggcgtaatggatcgccaggttgtcatcgattaacaaaatactgttaatcaggctgttgaggatctgcccagcatcgggctgcgtgcctgttgccataaagcagtctcctgaacaggttgcaccattttagtgcattatagctttttacggataaaaagcgcgaagcatcagagaattgacggagaaaaaagcccatgcagagatgggctacagatagctgacaaacttcacgttggagagcgactcacctgctccggcctaccacatcatcaccgtgtaggccggataagacgcatttgcgtcgcatccggcgtgatgtgcttgccaccgatcccaggcctgccagagacaggcgaaaagtttccacggcaactaaaacacttagacgctgtagtacagctcaaactctaccggatgcggagtcatacgcacgcggtcatcttcttcgcgacgcagagcgatgtacgcatcaattgcttcgtcagtgaacacgccaccggctttcaggaactcgcggtccagatccagttcgttcagtgcttcttccagagagcctgcaacctgtgggatctctttcgcttcttctggcggcaggtcatacaggtttttgtccatggcttcgcccggatggatcttgttcttgataccatcaagaccggccatcagcagggcagcaaagcacaggtacgggttagctgccggatccgggaaacgtacttcgatacgacgtgctttcggagaagaaaccaccggaatacggatagacgcagaacggttacgcgcagagtaagccagcattaccggtgcttcatagcccgggaccagacgcttataagagttggtggtcgggtttgccagggcgttaatcgctttagcgtgtttgattacgccgccaatgtagtacagcgcctgctcagacagacctgcgtatttgtcgcctgcgaacaggttaacgccgtttttagacagagacatgtggcagtgcataccggagccgttatcaccgaacatcggttttggcataaaggtcgcggttttaccgaagcggtgcgctacgttgtgcacaacatatttgtagatctgaatttcgtcagcttttttggtcatggtattgaagcgggtagccacttcgttctgaccagcagtcgctacttcgtggtgatgggcttcaaccaccagacccatctgttccatcaccagacacatttcagaacgaatatcctgagcgctgtctaccggtggaaccgggaagtaaccgcctttcactgccggacggtgacctttgttaccaccttcgtattgggtggaggagttccatgcgccttcgatatcgtcgatagcaacgtgggaaccggagatagaacttccgaaacggatgtcatcgaacaggaagaattcaggttctggcccgaacagtacggtgtcggcaatgccagtggaacgcaggtaatcttcggcgcgcttcgcaatggagcgcgggtcacggtcatagccttgcagggtgccaggttcaaggatgtcgcaacggataatcagggtggagtcggcgaagaacgggtcaatcactgcggtggatgcgtctggcatcagcaccatgtcggactcgttaatgcctttccagccgccaatgctggagccgtcaaacattttgccttcttcgaagaattcagcattcacctgatgagcagggatagtgacgtgctgttctttacctttagtatcggtgaagcgcaaatcaacaaacttcacttcgtgctcgttcagcatcgtcagtacgtgttcagcggacatactttaactctcctggattggtcatggtcgtcgtggtaacgaaatctgcaattattttggccgtgtcgccgtaaaaaagataaagcgaaatctgtgccaacttttaaattgcccctaaaaggcgttatcatgcgcaccatcgtgcaaaagggctgcaccacgatgtgaatgttgcaccaatatagtgcttcaatggaaacattaagcaccatgttggtgcaatgacctttggataaccctttttatgctccgtgaaagcgatcacaaagggactctgcaatacttgtttgcggaggatgtttgtgatcctgttttgtagtgcgattaatccgtgtacaataacgcgctatttctaatgcctgaggcaaagttgtgatcgaaaaattgcgtaatatcgccatcatcgcgcacgtagaccatggtaaaaccaccctggtagacaagctgctccaacaatccggtacgttcgactctcgtgccgaaacccaagagcgcgtgatggactccaacgatttggagaaagagcgtgggattaccatcctcgcgaaaaacaccgctatcaaatggaatgattaccgtatcaacatcgttgataccccggggcacgccgacttcggtggtgaagttgaacgtgtaatgtccatggtagacagtgtgctgctggtggttgacgcatttgacggcccgatgccgcaaacgcgcttcgtaaccaaaaaagcgtttgcttacggcctgaagccgattgttgttatcaacaaagttgaccgccctggcgcgcgtcctgattgggttgtggatcaggtattcgatctgttcgttaacctcgacgcgaccgacgagcagctggacttcccgatcgtttacgcttctgcgctgaacggtatcgcgggtctggaccacgaagatatggcggaagacatgaccccgctgtaccaggcgattgttgaccacgttcctgcgccggacgttgaccttgacggtccgttccagatgcagatttctcagctcgattacaacagctatgttggcgttatcggcattggccgcatcaagcgcggtaaagtgaagccgaaccagcaggtcactatcatcgatagcgaaggcaaaacccgcaacgcgaaagtcggtaaagtgctgggccacctcggtctggaacgtatcgaaaccgatctggcggaagctggcgatatcgttgcgatcacgggccttggcgaactgaacatttctgacaccgtttgcgacacgcaaaacgttgaagcgctgccggcactctccgttgatgagccgaccgtttctatgttcttctgcgttaacaccagcccgttctgcggtaaagaaggtaagttcgtaacgtctcgtcagatcctggatcgtctgaacaaagaactggtacacaacgttgcgctgcgcgtagaagaaaccgaagacgccgatgcgttccgcgtttctggtcgtggcgaactgcacctgtctgttctgatcgaaaacatgcgtcgtgaaggtttcgaactggcggtatcccgtccgaaagttatcttccgtgaaatcgacggtcgtaaacaagagccgtatgaaaacgtgactctggacgttgaagaacagcatcagggttctgtaatgcaggcgctgggcgaacgtaaaggcgacctgaaaaacatgaatccagacggtaaaggccgcgtacgtctcgactacgtgatcccaagccgtggtctgattggcttccgttctgagttcatgaccatgacttccggtactggtctgctgtactccaccttcagccactacgacgacgtacgtccgggtgaagtgggtcagcgtcagaacggcgtactgatctctaacggtcagggtaaagcggtcgcgttcgcgctgttcggtctgcaggatcgcggtaagctgttcctcggtcacggtgcagaagtttacgaaggtcagattatcggtattcatagccgctctaacgacctgactgtaaactgcctgaccggtaagaaactgaccaacatgcgtgcttccggtactgacgaagccgttgttctggttccgcctatccgcatgactctggaacaagctctggagttcatcgatgatgacgaactggtagaagtgactccgacctctatccgtattcgtaaacgtcacctgacggaaaacgatcgtcgccgcgccaaccgcgcaccgaaagacgattaatttcgttttttagtcataaaaaacctgccagcgatggcaggtttttttttgcctgtcgtgagcgcacaccaatgcgagtatctcccttataagtctgtggttacgtcaatagagagctttgtcacaattatctgcaaagtcatacgccgttaattgctttcttttttggcgtaagcgtaagatgcttcatctggtttaaaccaaaaggattaaacaatggcggagaatcaatccaccgtagaaaatgcaaaagagaaactggatcggtggttgaaagatggcatcaccacgccgggtggaaaactccctagtgaaagagagctgggagaactgctgggcattaaacgtatgacgctgcgccaggcgttgttgaacctcgaggcagaatccaaaatcttccgtaaggatcgtaaggggtggttcgtgacccagccgcgatttaattacagtccggagctgagcgcgagctttcagcgggccgcaattgagcaagggcgagagccttcctgggggtttaccgagaaaaaccgtaccagcgatattcccgagacgctcgcgccactgattgcagtgacgccaagtactgaactctatcgcatcaccggctggggggcgctggaaggacataaagttttctatcacgaaacatatattaatcctgaagttgctccgggctttattgaacaacttgaaaaccacagtttttctgcagtctgggaaaagtgctaccaaaaagagacggtagtaaaaaaattgattttcaaacccgtcagaatgccgggcgatatcagcaagtatcttggcggttctgcgggtatgccagcgatcttaattgaaaagcatcgcgccgaccagcaaggcaatattgtccaaatagatattgaatattggcgatttgaggccgtagacctcatcattaatctgtaagtgttttatggtgacaataaataacgcaagaaagattctacaacgtgtcgacactcttcctctttatttacatgcttatgcctttcatttaaatatgcggctggaaagagtgttgcctgctgatttacttgatatcgcaagtgaaaataatctacgtggcgtcaaaatccatgttctcgatggcgagcgtttttctcttggtaatatggacgataaagaactctctgcctttggggataaagcccgccgtctgaaccttgatattcatattgaaaccagcgccagtgataaggcatctattgacgaagccgtcgccatcgcgttgaaaactggggcaagctccgtacgtttttatccacgttatgaaggtaatttgcgcgacgtattaagcattatcgctaacgacattgcctatgtacgggaaacgtatcaggacagcggcctgacttttacgatcgagcagcatgaagatttaaaaagtcatgagctggtgagcctggtcaaagaaagtgagatggaatctctttccttactgtttgattttgcgaacatgatcaatgcaaatgagcatcccatcgacgctttaaaaacgatggcaccgcatattacccaggtccatatcaaagatgccttgatcgttaaagaaccgggtggcctgggtcataaagcctgtattagtggtcagggtgatatgccgttcaaagcgttattaacgcaccttatctgcctgggtgatgatgagccgcaggtgacggcatatggcctggaagaagaggttgattactatgcgccggcgttccgctttgaagacgaagatgataatccgtggatcccttatcgccagatgagtgaaacaccattgccagaaaatcatttactggatgcgcggttacgtaaagaaaaagaagatgcaattaatcagataaatcatgtgcgtaacgtactacaacaaatcaaacaagaggcaaaccatcttctgaaccactaataagttttaactcatacgcagttaataaaaccattccatatgaatggtcggtatcttattgcctttaaaacagtgattttaaaaatcgcttaggggatgttatgctcacgaaaaagaaatgggcgttatttagtctattaacactgtgtggcggtacaatttataaattaccgagcctgaaagatgcgttttatatcccgatgcaggaatatttccatttgaccaatggtcaaattggtaatgctatgagcgtaaacagttttgtcaccacagtgggcttttttctgtctatttattttgccgataaactaccgcgcagatacaccatgagtttcagtctcattgcgacaggattactgggtgtttatttgacgacaatgccggggtattggggcatcctctttgtctgggcgctatttggcgttacttgcgacatgatgaactggccggtcttgctcaagagcgtaagtcgattgggcaatagcgaacaacaaggtcggttgtttggcttcttcgaaacagggcgtggcattgtcgataccgtggtggcattttctgcgttggcagtatttacctggtttggcagtggcttattaggttttaaagcaggcatctggttctattcccttattgtgattgccgtaggcattattattttctttgtcctgaatgacaaagaagaggcaccgtccgttgaggtgaaaaaagaagacggagcaagcaaaaacaccagtatgaccagcgtgctgaaagacaaaactatctggcttatcgcttttaacgtcttcttcgtttacgcggtttactgtggcctgacattcttcattccattcctgaaaaacatctatctattgcccgttgcgctggtgggggcttacggcatcattaaccaatactgtctgaaaatgattggtggaccgattggtggcatgattagtgataagatcctgaaaagcccaagtaaatatctatgctacacctttatcattagtaccgctgcgctcgtactgttgattatgctgccgcacgaaagtatgccggtctatttagggatggcatgtacgctgggctttggcgcgatagtctttacacagcgagccgtattttttgcacctatcggcgaagcaaaaattgctgaaaataaaacaggtgcggcgatggcgttgggtagctttattggttacgctccggcgatgttctgcttcagtctgtatggctacattctggatttaaatccggggattattggctacaaaatcgtgtttggcattatggcctgcttcgcattcagtggtgcggtggtttccgtaatgctggttaagcgtattagccaacgtaagaaagagatgctggcggctgaagcttaattaatggccggatgtgcttaatccggccaacgaaaaccgtatcaaccgtaggccggataaggcgtttacgccgcatccggcagtttcacatcagaagaaatacttcgtcccgatacggatctggttttgctcgcggtggtacggttcgacgttgcggtctaaccagcgcaattcgaaataagggagccagtgttcattaatacggtaacggaaggtgttagtgatttcccaatgatgatctttcccgttgctactattaaagtcattcactcgcatgaagtaatgtggctcaaatgtataggaaaatttatcggtgattttaaaattccagtaggtgccaatttcataggtgtcattattatccagttccccgctcaaatctgtactactatagttattatggttatagcgatttcgtactgtcagattaaaccatggtacaaatttatagttgacgtccagatacactgcaccaccgctaccgatactcttatcattaattaagccaccgggctggatggttaatttatcggttggtttaaataacggataccagccttcaatttcgttatatccatgttttagttcatcttctcgctgaaagttgtaggtattggttaacataatacccgcgcccatatcgaagttataacccacacgtagcataacctcgccctgatcggaggcaagattatatgcctccctgttttcgacgtatgcgccagcaaatacgctggcagaggtcagagaagataataaaattattgcattaatctttttcataataagtccattttttaaacgtagggaggccgccacccaccaggatggaaatagcggctattgacatttataacgttacggaagccgttttttcttctgtcgccatctctttatttttgcgttggttgatttcctcaataatcaatgcaaaccgtttttcattgagtgtgtaaaagaatcccatcgtcaatgcagcaataattgccagtgcacaaggccagataaaaatgagctgacgcaaaccctgtaatgtcgcatcgctttgcgcgatgttgggaacataaccaatttgcgtcagcataatgcctggcaagaagccagcaagtgcggcagaaattttacgaaagaaggtataaccggtataaacagaaccttcggcacgaataccggttttccattcaccgtaatctacggtatctggtaccagtgcccagttcaggctgtttacaaaggccgtgccaaaaaaggcgacacaagagaacatgacgaaagtgaaagagttacttccccagaaataattcagtatatcacccaccgcccacagcaccatgccagccagataaacctgttttttaccaaaacattttacagttaatggcaccagtaatacgccgatgaggatgcatcccatactgaagaatcccatccagctcaataaattaatatcattcagcacatactgggtgtaatagacctgaatcgccagtttgatattaaatgccgccagggtacacaagttagcaatgcataaaaccagcaatggcggattccgaaatatcgcgcaaaaacttttgagaatactggctttatgtccggttggcgttgtgtccacataatgctctttgacgcctctgtagcacagcatcataaaaataaagccgccaatggagaacataagtgccgcacaggcataaccgacggtactgtcagaaaaaaggctctgcaacggaataaacgccacggtacaaatcaatagccctatggttgcaccaccctggcggtaagccgcgagctgcgcgcgctcattcgggtttttggtaattgccgggatcatcgcaccatagctgcagttcatcagactgtaactaagtccaaacatcataaacagcgcggtggcaatcgtcgttttaaccggcaaacaaaaggtggtggcgataaactggagcgttgcaattaacgccgccggaaccgctgcatataaaataaagggacgaaatttgcctttaggcccaatatttttccggctgtcgagtaaaaatccggtgagcatatcggtaaacgcggtaaaaaacttcgccaccagaaagataatcccgccatagtaagcaggcatccctaattcatcggtataaaatttgaggagatacagagtaccgatgcagagcattaaattgctaccgacgtcgcccataccataggcgattttttcccgcagattcagttttaatgtcagtggattatggtcagacataatcactccttataacgccccgcagggcgtcgtttattattattacgccgtgcgtttacgggcttctatctcttccacaatgcggacatacatcttctcgttcaggctgtagaagcaacccatcgccacaatggtgactaccgccagtgcgcttgggtagatgaagatcaactggcgtaacccttcaatggtgtggtcagcctgtgcgacgttcggcacatagccaatttgcgtcagcatccagccggggaagaaaccagccagcgcctgagacactttgcgaaagaaggtaaaaccggtgtagaccgttccttcgctacgcacgccggtgcgccactcgccgtactcgacggtgtcggaaaccagcgcccagttcaggctgttaacaaacgcactgccaaagaacgccaggcaggagaacgccacgaagctgacgctaccgccgccgaagaaatagttgagcagatcgcccagcacccaaatcagcaggccgccgatataaactttcttcttgccaaaacgtctgacactggcaggcatcaggaatacgccgatgaaaatacagcccatgctgaaaaatcccatatagctcaacaggatgggatcgttaagcacgtactgggtgtaatagacctggatggcgagcttgacgttaaacgcccctaaagtgcagaggttggcaatgcacagaatgaacagcgggcggttacccgcaattgcgcggaaagattgcagcaggcccggcttttgcgccggattagcaggctgggtttcgacataacgctctttcacgccgctgtagcagatccacataaacagcaggccaaacagactaaacagcgtggcggcgaagatatagccaagttgctgattaccttcgataagattcataactggcacgaatcccaccgtgcacagcagcaggcccagcgtagcgccgccctgacgccatgccgccagactggcgcgttcgttggggtttttggtgatagcgggaaccattgcgccgtaggagcagttcatcatgctgaaaaacagtccgtaaagcataaacagaatagtggccatcaccgttttaccggtgacatcaaacggtgtgccgacaaagttggcgatcgccagtaaggtgaccgggaaactcgcatacagaataaaaggacggaacttaccttttggaccgatcttgcgtcgggaatccaacataatgccggtacccatatcggtaaacgcagtaaagaatttactaatcaaaaagataatgccgccataggtgcctggcagccccagaacgtcggtataaaacttcaaaagataaagcgtaccgatatccagcaggatgttagaggccaggtcgccaataccgtaagagagtttctctttaaagggcaggcgtaaagttgctggatcttccgttgtgatgtgactcatgcttgttctccctttgcccatgagtttccccacgggcggatgtgattagatgctttttaagctcgcgaacagtgccgcccattcgctatcggcgcgataaaagaccggcggcttgccgatgggcgcattaacggtaacttccccgccccggaacgcttcacccgtccaggcgtggacccagttatcctccggcagatagagcgtccagtcgctacggccttcttcatgcaccggagcgaccagaatgtcgcgacctaacaggtactgatatttcagggtgtaagtgtgcgcatcgtcttcgtaatgcaggaacagcgggcgcataaccggcaggccggacttcgcattcagcgcgacggcctctttcaggtaaggtttcagggtggtgaagacggtggtcatacgggcgaaatgggcgatggtttctgcgtcgccgtcaaactgccagttgtcgccaggacggttaccttcgtgggtgcgcatcatcggcgtgaaggcgctgaaatcgcaccagcgcagcagcagctctttgctgcgcttcatctcaaacagggtggtgtaaccgccaatgtcgctgtggtgcaggccatgtccggtcattgccaggctcagcgccgccgggacaacgctcgccaggccatcgtcgagactccagtcgacgttctggtcgcccgcccacatcatggtggagtatttctggctaccggtagaaccggcgcgcataaagaaaaggatctcgccgagcttgcccgtttcttcaagggcttcgtagttacacttcgcccacagcgcaggccaggcgttatgcataatttcggcactgacgccgttatgcaagtacgtgtcggtgggcagatactcgccgaagtcagccatccagccgccgcagccgagttcaatcatgttctttttgatcacttccttgaaccaggcgtaggcttctggattagtgagatcgacaacgccgccgtaaaactcgccaaactccaccagatagtcaccgccagaggcatcttttgccagatagccgtgttgtgccgcttcttcgcagagatctttatcgctggcaacatacgggttgatataggccaggaactgcacgccctcctgattccactgcttaatgcgactatccagttgcgggtagttttcgctgttccacttccagttccacatcacgcgtttgccaaaagaggtcatacgaataccggaccagtcctgcgcccagatgccgttgaccttcacgcccgcgttacgcatggtgtccagtttcttctggcacacttccgtcccgccctgaatgccgagcgttactccgtcataaatccagtcgggcagttctggctggcgtcccagcagggcggttaatttttccagcagggaaatgtatgtgtcagcacattcaaaacgcagcgttgctttgtcttcccacagcgccagttcatggtattccggggcactaaagtcgaagttcatatagcaactgttatcaacatggcagtaatacttctgcgtgctgacaaacgtaggctgtgggaagaaagtccagtaatagtcgccgcccgcattttctttgcagtcggcctgccaggtgacataggtttgtttgttgcgaccaacgccttgttcactggtccatagcgggaacggtttgccacgcagatcgaagtaggaaaactgttcgccgcagccgtagatatggtcctctggttgagcggcaaggcgcagccagatacggttgtggttaaggttgtcgttttgtagttccagcaataaacgcccctgatcgtcggcagagatattcagcgtggcgctaatgtcagaaccacggctgaaatgaattaaccaaccatccggactctggctgacgatggcgtcggtaagcgcaattttctcctgtagtttatctttaatgctgaaattaccgcggaacatatcgatatccgctataccactgccaatccataaacaaggattatctttgctatgggttaaaataagacgttgttgaaaatgtagggtaaaactgtcgttattctgatgaaattgaaaatctaataactgtggacgtggcgtatccataactaatctccatagagttgagaacgagattgttgccttcctgttattacaggcttatgtaaaatgattctcataaaactgatatataaaaactttacagaagctgagctgtttttaacttaataaattgaagatacataatgttgcctttagcgagtgaaatgttcttcaatgattttgactgctaatcaatacaagttattttctctgtccgtaaatattaaaaaacaggcggtgcggttttccactttccagtaataataagtcgataccactattaaaggcgttaggcgggcaactcataggttcaactgccagtccctgacgctgtaatttttcaccgctataaacctgcacccagagttgatcggaacaaaggcttacgctaagcgcctgctgtggatgggtaatggtcatttcccacaaatcattagcggttttaaaggtgtggtcgatttttgtcgcggctatttttttcgcctgcgtgaaatttaaatccagctcatcaacgtggtgaagcgttgtcggattcgcgtgctcatcgacggcataaacctggtttgccggaagctggaacagatattcatcaacagatgttaagttgcaggttaaataaggatgaatacccacgccataaggcgctgcgacagtgccgatattctggcttgcgatctcaacggaaagacccgtgtgtgcgttgaggctataaacaacttgactagccagcataaacggatagccgtaactgggcggcagaaaagctgtcagggtaacgctggtggcggttaattcactaatttgccagtctcgccaggcaagcagcccgtgaatagcggctttactactatgttcattaatgggtaactgatattcctgcccctgatagcggtaacagccgttggcgatccggttcggccacggaataagcactttacccagatgcgccagcggcatctcttcgggtttgtgcgggatgactaaatgacaaccctgaaaggttaattcagccagaccagcaccgacggtcacaatggtcgcgtgataatcccccgcggcaagactaacggtctgtccactgcaatgcatattggtgatttgcatacaaggcaccttaattaagctcatacagcctcccgtgaggctgatgtcaaacccaaaaactgcaccggacggtcccctcgcccctttggggagagggttagggagaggggaaaacccgcaccctattttcagatcagttatttcgcattaatatccagcagacccgctgcaaccgctggagccatgccgggcgctaacgggatacgcgggatcaccaggcaatgcagcaggtgataaatatcctgtttgccgtcccagactttggtggtgaccttattgtccgcatccagctcctgccaccaggaaccattttcatagtccatcaggtacttaatgcagtactcccaccatgtttgataccaggtttcatactggcgatcgccagtgacggtgtagagcgcgtaggccgtacccattgcttcgacgataggccaacgtacacgttcgcggaccaccggttttccttcccagtcaacggtataaacaatcccgtccgcgccatcgggtgcccaggcatcgcgcacggtggcgttaaacagacctttggcatcttctagcagccatgctggtggttgttcgcaacgggcttccagggcagcatggatgtgcagcattaaacggccccattcgatccagtggcctggtgtacctccgaacgcgcggaagcgatgcgccgggttatctttgttgtaatccggcagcggattccactgggtatcgaagtgttcgttaacgcgataatgattatttctggcgacgtcgtggataatcacggaagccacgcgaatcgcgcgatccagccattttttgtcgtgagtgacgtcataaacaatcaagaaagcttccaccgcgtgcatattggcattgccgccgcggtactcttcggttttgctgaaggcttcgtcccaggattccaggcacatctgctcttcttcgctccagaaatatttctcgataatttcaatggtgtaatcgagcagcttgcgcgcttccgggtgacccgttgtgacggcgctggcggcacccagcagagcaaagaagtgttgatagccctgtttggaggcatccaccacgccctcgtcattcacgcaggcataccagccgccatattttttatcacgcagtgcgccgttcatggctttgataccgtgatcaaccaagctgtaagcgccaggtcgacccatcgccgcagcaacggaataaacgtgcaacatacgagcggtgatccacagatgggtgcccatctcttctttgatttgccctttattgcctaaccagccaaaaccagtcggcactacggaatttttaccaaaatcaaagatgcggtcggtttcctgttccagccaacggttgtggcttagggtgttaaaccatttcattccttttatcctcatcttagcggcgtttagccatcatttcgtcgacgatatcgccaagttgttgtaatttcggtgcgcaaacgtcacgcagcatcagctcgttgtctggtaaaccgacgacgcttgcccagactgcacggcctgccaggaatccgcttgcgcccgccgtcattgccacgcgtacggcacgcgggaacagtttttcgtcgacaccggaagagaggatcacccatggcatattgatatggtcattcagacgttgactagcacagagaagctcttgttgcggacctttgccataaagcggcatttcaactttgtagaggtcagcgccactgtcgcccagctctttggcggcatcgatgatcgcttgttcgcgatcgaatttatcgccacgacgcggtgggcggacgactggctcaatgatgcttaccagaccgtgactgtggcacagttcgttgaactctttcaccatatccagacgttgctgcgcatcttcatcactacgccacagcaccagcagttttaaggctttgccaccgtcttgtttgatctgtagcggattgattttgcggtcaataaccacgctatcgaccggaataccgttgccaggaatgaactcatcggcggcgacaatcatggcgcaacttttggcaatcgcgttttgctcaaccacctggcggtagcagaattgttgatctaccagaatcgcgctggcataagggctgagggcctttgcagcgttaactttgaaatcagttaaaacgctatcggctaccggagcgggtgccccagccgcggcaaacatcatgcgcatggcttcgcgctgatcgaccgccagcatggcaaaaccgccgcttgcgcgcgtaatgtcgttgatggtgtacttattcattcatttattcctttatccagtcgttacatttttactttggcagtcatcccggcactgacacggacctgttccagaatggcggaccagtcctggcgaccgcgacccgctgcgcgcgcctggctataaacctcccgactggcggcccccagcggcattggcacatgcagctggttggcgacatcaagggcgatgccaagatccttatgggcaagatcgatcatgaaggcgggagaaagatctccgctgaggactttgtttggccaggaagtggtgaagtgacctttaccggcggcggtaccgctcatcactttgacggcaacatcgaagggaagattcagggcttcgcacaaaacggcggcttctgcgctaagcgcattgagcgcgatgctcatgtagttgttgatgagcttaacgcggatccccatgcccggaccgccagcgttgatcaactcactgcccatcgccatcaggatcggtgtggcacgttcaacttgttcagcggtgccgccagccagcagtaacagagtaccggtaatggcatttgcagaagtacggcctaccggaacatccatcatgctgaagcctttggcttgcatatcggcaatcaatttatcggtttgcagcggatggatggtggacatatcaatgaccagcgcatcggtagataagccttcgcaaacgccgttttcaccgaacaacacgttgcgcaccagatcgccattcggcaacatggtaatgataaattcggcatctttagcggcctgcgccgggttggcggcgggagtcgcacctttgtctaccagatgccgcacagcttcggcgttcacatcaaagacgcgaagttgatgcccttgctgcaataaattgctcgccattgggctacccatttgtcctaaaccgataaacgcgattgctgccataaccctctcctgaatacagttatgtcactttttgtcatttatgacatgctttgcttgtctgtttttgatcgtatttgtaatttatcgtcaaaaaattgacagccgtcactttttaaacaattggtgaaattaaaatgaacgcatcccaaaatgtttaaggaatgaccatgattcgtgttgcttgtgtaggtataaccgtgatggatcgcatctattacgtggaagggttaccgacggagagcggtaaatacgtggcgagaaattatacggaagttggtggcgggccagcggcgacggcagcggttgcggcggcaaggctgggggcgcaggtcgattttattggtcgcgtaggtgatgacgacacgggcaacagcctgctggcagagctggaatcctggggcgttaacacccgttacaccaaacggtataaccaggcgaaatctagccaatccgccatcatggtggataccaaaggcgagcggataatcattaactaccccagcccggatctgctgcctgacgcagagtggttggaggaaattgatttctctcagtgggatgttgtgctggcagatgtacgctggcacgacggcgctaaaaaagccttcaccctggcccgtcaggcgggtgtgatgaccgttctggacggggacattacgccgcaggatatcagtgagctggtggcattaagcgatcacgcggcctttagtgaaccgggtctggcgcgcttaacgggcgtgaaagagatggccagtgcgctaaaacaggcacaaacgctcacaaatggtcatgtctatgtgacccagggtagcgcaggctgcgactggctggaaaatggtgggcgtcagcatcaaccggccttcaaagttgatgtggtagataccacaggtgcgggtgatgtttttcacggcgctttggcggtggcgctggcaacaagtggggatttagcggagagtgtccgcttcgccagcggtgtagcggcgttaaaatgcacacgtcccggtggacgagccgggatccctgactgtgatcaaacccgatcttttttgagtctttttgtataaaatgccagggtgatggtttttcgaggaattttcatgagccttaccgaactaaccggtaacccgcggcacgaccaactcctcatgctgatcgccgagcgtgggtatatgaatattgatgagctggcaaatctgctggatgtctccacgcagacggtccgccgggatattcgtaaattaagcgagcaaggcctgattacgcgccatcacggtggcgcgggtcgggcttccagcgtcgttaatacggcgttcgagcagcgtgaggttagccaaaccgaggaaaaaaaagcgattgccgaagcggtggcagactatattcctgatggtagtacaatatttatcaccattggtacgactgttgagcatgttgcccgggcgttacttaaccataatcatttgcggataatcaccaacagcctgcgtgtggcgcatattctttaccacaacccgcgctttgaagtgatggtgcccggcggtacgttgcgctctcataatagcgggatcattggccctagtgcggcgtcctttgtggctgattttcgtgctgattatctggtaacaagcgttggggcgattgagagcgatggcgcgttgatggagtttgatgtaaacgaagctaacgtggtgaaaacgatgatggcgcacgcgagaaatattctgctggtcgccgatcacactaagtatcatgctagcgcggcggttgaaattggtaacgtggcacaggtcactgcgctctttaccgacgagctgccgcccgctgcgctaaaaagtcgcttacaagacagccaaattgaaatcattcttccccaggaagacgcgtaaatttttgtgaccgttaacctggcttcataccttgccacatagccaaacccatcctttcccgctacagttaatttcttgtggcgcgaaaggaggcaaaaatgctctatatctttgatttaggtaatgtgattgtcgatatcgactttaaccgtgtgctgggagcctggagcgatttaacgcgtattccgctggcaagccttaagaagagttttcatatgggggaggcgtttcatcagcatgagcgtggggaaattagcgacgaagcgttcgcagaggcgctgtgtcatgagatggctctaccgctaagctacgagcagttctctcacggctggcaggcggtgtttgttgcgctgcgcccggaagtgatcgccatcatgcataaactgcgtgagcaggggcatcgcgtggtggtgctttccaataccaaccgcctgcataccaccttctggccggaagaatacccggaaattcgtgatgctgctgaccatatctatctgagccaagatctggggatgcgcaaacctgaagcacgaatttaccagcatgttttgcaggcggaaggttttagtcccagcgatacggtctttttcgacgataacgccgataatatagaaggagccaatcagctgggcattaccagtattctggtgaaagataaaaccaccatcccggactatttcgcgaaggtgttatgctaaaaaccattcaggacaaagccaggcaccgtacccgtccactatgggcctggctaaaactactctggcaacgcattgatgaggacaacatgacaaccctggcaggtaaccttgcctatgtgagcttgctcagtttagtgccgctggttgccgttgtttttgcgcttttcgccgcttttcccatgttttccgacgtcagcattcagttacgtcactttatttttgccaactttctgcctgctactggcgatgttattcagcggtatatcgaacaatttgttgccaattccaacaagatgaccgccgttggggcgtgcgggctgatcgtcaccgcgttattgttgatgtactccatcgatagcgcgttgaataccatctggcgcagtaaacgagcgcgaccaaaaatttacagcttcgccgtgtactggatgattttaacgctggggccgctgctggcaggggccagtctggcgatcagttcctatttgctctccctgcgctgggcgagcgatctcaatactgtcatcgacaacgtgctgcgtatttttccgttgctgttgagctggatctccttctggttgctgtacagcattgttcctaccatccgcgtacctaaccgcgacgcgattgtcggcgcgtttgtcgccgcactcctgttcgaagcaggaaagaaaggtttcgcgctttatatcaccatgttcccgagttatcagctcatttatggtgtgctggcggtgatccccattctctttgtttgggtctactggacatggtgtatcgtcttgcttggcgcggaaattactgtcactctcggggaataccgcaaactaaaacaagcagctgaacaagaagaagacgacgaaccatgattgcattaattcaacgcgtaacccgtgccagcgtcaccgtggagggagaagtgacgggcgaaattggcgcgggacttttggtgttattgggtgtcgaaaaggatgacgacgaacagaaagcaaaccgtctgtgcgagcgtgtgctcggctaccgcatctttagcgatgccgaaggcaagatgaatctcaacgtgcaacaggcgggcggcagtgtgctggtggtttcccagtttaccctcgccgcagataccgaacgggggatgcgcccaagtttctccaaaggtgcaagtccggatcgcgcagaggcgttatatgactatttcgtcgaacgctgccgtcagcaagagatgaacacgcaaacaggacgcttcgctgcggatatgcaggtaagcctggtcaatgatggccccgtgacattctggttgcaggtatgagccagcttccagggttgagtcgggaaacaagagagagtatcgctatgtatcaccttcgggttccacaaacagaagaagaattagagcgttactatcagtttcgctgggaaatgttgcgtaagcccctgcatcaaccaaaaggtagcgaacgcgacgcgtgggatgcgatggcgcatcaccagatggtcgtcgacgagcagggtaatctggtggcggtaggccgactgtatattaatgccgacaatgaagcgtccattcgctttatggccgttcatcccgacgtgcaggacaaagggttaggcacgctgatggcgatgaccctggagagcgtggcgcgtcaggaaggcgttaagcgcgtgacctgtagcgcccgtgaagacgcggtggagtttttcgccaagctggggtttgttaatcagggagaaatcaccacgccaaccaccacgccgattcgccattttttgatgattaagcccgtcgccactctggatgacattctgcatcgcggcgactggtgcgcgcagctgcaacaggcgtggtacgaacatatcccgcttagtgaaaaaatgggcgtgcgcattcagcaatataccgggcaaaaatttatcactaccatgccagaaaccggcaatcagaatccgcaccatacgctgtttgccgggagtttattcagtctggcgacgctcactggttggggacttatctggctgatgctgcgtgaacgccacctcggcggaacgattattcttgcggatgcgcatatccgctacagcaagccgattagcggtaaacctcatgcggtagccgacctcggtgccttaagcggcgatctcgaccgtctggcgcgcggacgaaaagcacgggtgcagatgcaggtcgaaatctttggcgacgagacgccgggtgcagtgtttgaaggcacgtatatcgttctgcccgcgaagccatttggcccgtatgaagagggcgggaacgaagaagagtaactgatggagaggggcggtgctgcctctctcattcaggtcatttatattagtccttggctatttcggttatattaaataagaactctataaatttttattcttcgttggctccatacgtgtcttgctacatcactgttcaggagcatttaaatattatttgtagaactgagtggcaattatcgcagataatgcttaattcatcatcttagttcatgtttgagcgatttttgatagtcaaaaccccctctggtgccatacttttctcataaatatttttaaaatctatagctaacaaatattatgcaaagataatggactagcatcattgtcagtatcattcatttactgctctgtatgttatgaataattatgttgtatgtttgctcttaaaccgtgggaaggaggctataatggttgccaatattaatctcattaaacaagaaagttattctgttgttaatttagaaaaacaactttcccgaactgttaccaacaaaattataacgatgagcaagtaaagaccggttggtggcagtactgaccggtctgtgatgaaagattaatttcaccttaaatcctggtgctgttaggatgctgacgtttttcggctacaccattcagattatgcaaataaatatctctgaatataatatattcatagcacccataattcatcctgggcgataactaaaccatttttgagtaataaatgaaacaactgcaacactcttattatttctggaaaacgcctcgcaaaaacaaaacaacatgcaaaaatccgctttttttaaatgattttccggcgtaattttcgcacatacattaatgagtaatatatgtaaggtattggtaatggcgatgaatacggtttttcttcatttaagtgaagaggcaattaaacggctgaacaagcttcggggctggcgtaaggttagtcgatctgcaattttacgcgaagcggtagagcaatatctggaacgtcagcaattcccggtgcgtaaagcaaagggaggcaggcaaaagggggaggtagttggtgttgatgatcagtgtaaggagcataaggaatgacaaaaatttttcattcttgaatataaaaaacagatgcccttattctggtattaatacaaggctgttttacttgaacttataataactgcaactgttacatcatatctggaaaacgcctcgcaaaaataaaaaatgatgcgtaaatgagctttctttaaagattcggcaagggtacttttctctccatagattcaaaaatgatattggcgagatatttatgaactctctggcaggtatagatatgggcagaattttactcgatttaagcaatgaggtgattaagcaacttgatgatctcgaggtgcagcgtaatcttcctcgtgcggacctattaagggaagcggtagatcaatacctgataaatcaaagccaaacagcaagaaccagtgttcctggcatctggcaagggtgtgaggaagatggtgtcgaatatcagcgtaagctgcgcgaggaatggtaatgggaaaaaatgatgtcaatcagattgctgacaacgtgcgcgttgttcatgccggatgcggcgtgaacgccttatccggcctacaaagtcgtataaattcaatgtattgcagtttattggtaggcctgataagcgcagcgcatcaggcaatcttacgcttgtcatcagtctcatgcccataaccttattgatgtggtggtgggtaaattgaggccaaaccggcactggcggcatagcttgaggtggtaacgcggaatacgagagatggtgtcgtcacaccctatgagctgtaatccgggcgacctgcgccacccggaaaacgtcagagattactctccttcacccggaaacaggaacgggttgatggaactgcgggcatagccttcttgctccattcgtgcgtccagtaccagagaggcgaggtcatctgctacggcttcgatttttggatctttttcctgatagagaattttcaggtaagtgtcgcagtcatcgcagctttcggctttaatcgcggcctgttcgtcatccaggctccagtaatgcagtttgccgctctgctcgcagttgctgcattttacgcgcactacgtgccattcagtttcacacaggttgcagtgcaggtaacgtagcccctgagtggtgccaatttgcaccatgctggacaccggcatagaaccacaaaccgggcaatattgacgttgctcgccgtattcagcgcgggctttgccggggatcagattggccatctgcgcccagtagaggctcagtgcagcccagataaacggcgctttatcgctgctgacggagctgaaatcagaggcaaacagcgcgctggccatatcttccagctcctgagtgcttgccttctccagattctcaatcactgccagcgccgggccgctcatttcaggtttcagctcagcaatcagcgccatcagcagcttttgccagtgcttatcacgcggcagaacgtgaatatccagcgggggcttgccttgtgcgctggcttctttaatgcgcgcagtcagatccatctccagcggatggtcgtacagcaccacttcctgggcgtgggcgataagcgcagcaaagcgcaggtaatcacccagaggattattttctgccagctcgcgcagacgctcggcgcggcggttgtataaattcttgagccgagggaacaataacggcggaatcatatccgccgtacgtttctcgctactacccagctcatcttgcgggattatgcgaatactcattcagctttcttttccgttgtcttgcggacctcacggtaccagcgcgggtgatgtttcttcgcccaggcgctggtaacccatccttccaccatggcggtaatcgtgcctttcacccaaagggcggcgtagatatgcaccatgataaccacaattaacgccactgcggcaaaactatgcagcattaacgcgaatcggatcaccgggatactgaaagcaggcgcaaaataaggacgccagataatcacgccgctcaccagcagcagaaccaggaaaataatcgccgcccagaaaacgcatttctgaccgaagttataacgcccggtgtcacctacttcctcgttgacgacgatcttacgaatattcttcgcccaaaagatatcatcccgattgattaggttgtgatgccagtaacggaaaaacatgatgatgaagctggcaaacataaccacgccgacaaacgggtgcagaattcgcgccagctgcggtgtgcccatgatttgcatcaaccagttgaaggacgggaacaaaaagcccagcccgctcaccgccgccaggatgaagcagaaggcggtgatccagtggttgatacgttccggcgcggtgtagcgcacgatggtgtcacgtcgtttcatttgcgctcctcgtctttctcttcgtgcagattattctcttcctcatccgcacggttcggaccgacacccacgtagtggaagatactggccgcaaaggtagccgcaaagccaacagccgcgagcggtttccagatgcctttccagaatttcacggtttcgctgatttccgggttctccggcaagccatgatacagatttggcttgtcagcatggtgcagcacgtacatgacgtgtgtaccaccgacgcctgccggatcgtacagacccgcattgtcgtaaccgcgggttttcagctcagcaacgcgctcgctcgccagcgttttcatgctctctttcgtaccgaagtgaatcgcgcccgttgggcaggtcttcacgcaggctggttcttgcccaaccaccacgcggtcaacgcacagcgtacatttgtagacgcggttgtcttccgggttgaggcgcggaatgtcgaacggacagcccgcaatgcaataaccgcagccaatgcactgctcggactggaagtcgacgataccgttggcatactgaataattgcaccttccgccgggcacgctttcaggcagcctggatcggaacagtgcatacagccgtctttgcggatcagccattccagtttgtcgttctgctccacttcgctgaagcgcattaccgtccagcttttggcgcttaaatcattggggttgtcgtacaccccaatgttattgccgacggtatcgcgaatgtcgttccactcactacacgccacctgacaggctttacagccgatacaggtggtaacgtcgatgagtttcgccacttcttcctggaagtcccgcgcctgaggcgcgggggtcagaccgttagtcgcggaacgacgaatgatatcttgagattgataagccatatgtcgtctccgttacaccttttccacattcacaaggaaggacttaaactccggcgtctgcgtgttcgcatcaccaacgaatggcgttaaagtattggcaataaagccttttttagctacgccttcatagccccagtgaatcggaataccgatggtatcgatatctttgccgttcgctttcagcgtgcgaatacgtttggtcaccaccgctttggctttgatatagccacggttggaggagactttcacggtatcgccctgggcaatgccaagtttattcgccaggctctccccgatttccacaaactgctctggctgcaaaatcgcgttcaacagcgcgtgtttggtccagtagtggaagtgctcggtcagacgataggtggttccgacatacgggaacttatcggctttacccaatgcttcggcgtcgtctttaaagatacgtgcagccgggttgctgataacgtttggatgcagcgggttagttcccagcggcgtttcaaacggctcgtagtgttccgggaacggaccttccgccatcttatcgagggcaaacagacgccccatgccttcctgctgcatgataaacggcccgacgccgctacccggaggcgctgcgctgtagtccggaatatcccagccggtccacttagtgccgtcccatttcagcaactgacgcttcggatcccacgggttaccctgcggatctgcggaggcgcggttatacagaatgcggcggttaagcggccatgcccatgcccagcccagcgtgttaccgaggccagacggatcggcgttatcacggcgtgccatctggttgccttccggcgtccagctaccggcgaaaatccagcagccacaggaggttgtaccgtcatcgcgcaattgggcgaagctactaagttgttggcctttcttgacgataaccgcaccggttgccggatcggtaatatcggccagcgccttaccgttgctctccatcgccacttcttcactagatggctcatgcggaatggcgtagttccatgtcatgttcagcacctggtccgggttcgcgccaccctgttcggcatacatcttgcgcaagcgcaggaagataccggagaggatctcgccgtcagtcagcgcaatccccggggcgtccgcacctttccagtgccactgtaaccagcgaccactgttaacgatagaaccgttctcttccgcgaagcaggtgcttggcagacggaacacttcggtctggatcttgctgctgtcaacttcgttcagctcaccgtggttctgccagaagttagaggtttcagtgttcagtgggtcgatggtgacgaggaacttcagtttgctcagacaaccgatcactttgtttttgttcgggaaactggcaacagggttaaagccctggcagatatagccattgaccttgccctctttcatcatctcgaagtattgcaggacgtcgtagcctttatcccacttcggcaaccagtcaaagccccagctattttccgccgtcgctttatcaccaaagaaggccttcatcatagagacgaagaatttcgggtagttgccccagtagtttacctggccttccagcagcggttttggcgtgttggcggtaaggtaggtttgcagatcggtctgcttctcgcttggcagcgtcatgtaacctggcaggctctggctcagcagccccaggtccgtcagcccctgaatattggagtgaccgcgcagggcgttaacgccgccgcctgccatccccatattgccgagcagcagctggatcatcgccatcgtacgaatgttttgcgcaccaacggagtgttgcgtccagccgagggcatacaggaagctggcagttttatcgtgagcactggtttctgcgatgtattcgcagactttcaggaacgcgtcttttggcgtaccacagatgttttcaaccacatctggcgtgtagcgggaaacgtgctgtttcagcaagttccacacgcagcgcggatgttgcagcgtggtatcgcgtttggcgaagccgttttcgtccagttcataagtccaggaggatttatcgtacttgcgtttttccgcgtcgtagccggtgaacaggccatcttcaaagccgtaatcctcacgcacgatcaggctggcgttggtataggcttcggtgtattcgcggttgaatttttcattgttcagcaggtacagcaatacgccactcaggaaagcaatgtcagtaccggaacgaataggggcatagtagtcagctaccgccgccgtacgcgtaaagcgaggatcgatcacaatcagcttcgcgccgttgtgaattttggcttccatcgcccagcggaacccgaccgggtgagcttcagcggcgttaccgcccatcaccacgacgaggttggcgttcttgatgtcgacccagtggttggtcatcgcaccgcgaccaaatgttggagcaagacttgctaccgttggtccgtgtcagacacgcgcctggttgtcgaccgcgagcatacccagcgcgcgggagaatttttgcgttaaatagccggtttcgttactgctcgcggaagcacacagcatcccggtggagagccagcggttaacagtcacgccttcggcgttttgcgcaatgtagttagcatcgcggtcttctttcatcagtttggcgatgcgatcaaacgcctcttcccaactgatttgctgccatttatcagaacctggcgcacggtattccggaaacttcagacggctttcggagtggatgaaatccaccaggccagcgcctttcggacaaagtgcaccgcggttgaccgggtgatccggatcgccttcgatatggaagatagatgctttggcgttttttgctccgtcaccgaggctgtacatcaacagcccacagcctacggaacaataggtgcaggtattacgggtttcgcgggtgcgcagcagtttatactgccgggtttccgcgagtgctacgctgggtgcaaaacccagtgccgctgccgtggtgcctgccataccgccagcgcagatcttaaagaactgccttctgctgacctgcatggattgctccttgtttcgacattgtcacgtcccatttacattcgcttgctgcgtgtgcagggagtgggagttatttttctttgcggaaggggccgcaaaggtccagaattggctcaatttccctccatccaggaagggtttgtaacagaataccataatgttggtgtgtgtgttcttatctggttaagagaaagtgaaaaaaacacagcgaaaagaaatcgaaaatgtgacaaatatcacaggtgttcgtcaaattgagttatggcggcgtgatgatttacaacacccacggttagatgaggtcgcggaagaagttcccgttgcgctggtctacaacggcattagccatgtggtgatgatggcgagccccaaagaccttgagtactttgcgctcggttttagcctttccgaggggattatcgaaagtccgcgcgatatcttcggcatggatgtcgttccttcctgtaatggtcttgaagtacaaattgagctttccagccgccgctttatggggttgaaggagcgccgccgggcgctggcgggacgtacgggctgtggcgtatgcggcgtggagcaacttaatgacatcggaaaaccggtgcagccgctaccgttcacccagacgtttgatctcaacaaactggatgatgcattacgtcatctcaacgattttcagccagtggggcaactgactggttgtactcacgccgctgcctggatgttgccatctggcgaactggtcggcgggcatgaagacgtgggtcgccatgtggcgctggacaaactgttaggccgccggagtcaagaaggggaaagctggcagcaaggtgcggtactggtttccagtcgtgccagttatgaaatggtgcaaaagagcgcgatgtgcggcgtagagattttgtttgcggtgtctgccgcgaccacgcttgctgtagaagtggctgagcgctgtaatctgacactggtaggtttttgtaaaccgggtcgggcaacggtttatacccatccgcagcgtttgagcaattaattaaaataagtcctgcgaaatatattaaattgcaggacttattcatttcgtgaattttattattttatttataaacaaaatgcgtgtagtggcgttttcttttttcatttattatgttcactctcttatctatatatttataaggcaattaaatgaaaaggaatttattatcttccgctattatagtcgccatcatgtccctcggtctgacgggttgtgatgataaaaaagccgaaacagaaacgctcccgcctgccaatagtcaacctgccgcaccagctcctgaagcgaaacctactgaagctcccgttgcaaaagcagaagctaaacctgaaacacctgcgcaaccggtggtcgatgaacaagcggttttcgacgaaaaaatggatgtctatatcaagtgctacaacaagttacagatcccggtacagcgcagtctggcgcgttatgctgactggctgaaagattttaaacaggggcctaccggtgaagagcgtactgtttatggcatctacggcattagtgaatccaacctcgctgagtgtgaaaaaggcgtaaaaagtgctgtggcgttaacgcctgcgctgcaaccaattgatggcgtggcggtgagttatatcgatgctgccgtggcgttgggtaataccattaacgaaatggataaatattacacccaggaaaattataaagacgatgcgtttgcgaaagggaaaacgctgcaccagacattcttaaaaaatctggaagcctttgaacctgtagccgaatcttatcatgcggcgattcaggaaattaatgataagcgtcagcttgcggaactgaaaaatattgaagaaagagaagggaaaacattccactactactctctggcagtcatgattagtgcgaaacaaattaataacctgataagccaagataagtttgatgcagaagcggcaatgaagaaagtgtctgaactggaaacgctagtggcgcaggccaaagaagcggataaaggcggcatgaatttcagctttattaatagcgcaggccagtatcaactcgaggctaaaaaatacgttcgccgcatcagagataaagtcccgtactctgactgggataaagagcaacttcaggacgcaaacagtagctggatggtcgaagactctttcccgagagcattacgcgagtacaacgaaatggttgatgactataatagcctgcgttaaacgtttttgatgataaatgcagtgtcggatgcggcgcatccgacacagttcaccccttgtgaagtaactccataaatgcctcatatcctgttaacccggcaataatctccgccggatgctgacacaatatgcttgccagatagctaaatatttttagctcatgacgcgcatcggcggcggcgcaggcgatcaagacatggttaatgacttcgttattcacctcaactggttgggcgagggtaataaaaaatccacgaaaacgtcgctcctgttcgctccagcaatgtgggatggcgaggcgattaacaatcaggttttcaccttcgccttcgcgggcgatgatgcgttgtgcttcatcggcggtaatatggtgttgtgcgactaattgcgcacaaatttgccgggtaatatgttgccagctttcaccgcgtacattgctataatgaaaacttccgggggcagagaaaaaacgctccggctgttggcgaataaatgccgtcgccagaaaatgttttatttgttcgataccggcagccgtaatgatattttttacggtgatgtaattatttaccgcgtcatccagtaaataatggctgttgttaatgatcaataacggctcaatctcttcgcgaatggcaacaagttcgcttaagctacgggcaataattacccgacaatttaaaacatcgcgctcaatggcgagctgattaatagtggcaatcgcgttctggtcgctgagcaaaatgatcggctggcgttcgttttgatgccgctccagcgcacaggcaaaatacaaaccgatcagatcgctgtcgaaaaggggaatatcgagctgttcacgcagtagcgtaataaagtgcagactcatatcaaaggccgcaggccaggcggctttcaggttattcatgctgctctggcggtgctcagcaatccacactggtgcggcaaggcaacgtaataaatgcccggtaatattctcaaccagctgcgcatcaataatattcaaactcgcgatgcccggcaccctttgcagcaacccctgcacattatcggcactaattacctgcgcttgctgatgctgtttctctatcaaacccgtcagggttcttacagcgttatcaccaagaaacagaccgctatgttcaacgatttgttttatctcgtcaccgggatattgcggccactcatcggtcagttgattacgcagggcgtaaatcgccagaatcaggctggagagataatcaccctgcatgagcggccagcggtgttggttgtcgcaggccgtggataaatgctgaaggttgtctcgtgttatgcccgccagcggaattaaaaacggatctttgcgcagcaagttcgccagcaagataacgcgtttctcttctgtctcatcaatgaaatggcccaaaccagggcggctggccaggcaacaagtgcgttcataacgctgttttaaccggggcagacgctctgctacccacgtttctggcaaattaagcgcgctggcgagttgcgcacggggagtgaaagtattcagtaataacagcgccagcagccgatcgtcgttatcgtgcttttgcagcaactgaaaaaagctgcggcgctcgaagatttccagctgatagcccgcactgccactggcgaaaatgcgggctttgccgttaagggtgaagttgagatagtcaatatcacgcaggatggtcctgccactaacgccagtctgttgcgccagctcgccaggcgtgcgcggctgttgctccagcagatcgacaatctttaactggcgttcgtttagcattaatccacctgacggaactggctaaacgcgttgactttctccgcagttaaggtcgtcagaaaaccccgtatcagcgtgagcagagcttcgtaatcggctttactaatcataccgctgttggcgtgcagataacgagttggcagacacagcgcgacaaccggacgcccgccgcccatcacgttgtagcgcccgccatccgtcgcaccggttttcatggtggaaaattgcagcggtaaatcgttatgtgcggcacagctttttaacgctgctaccagtttctggttggggaagtagcgcttgtcaaacagcatcagccccggcccctggcccagtttcagcgggtatttaatgttatcaatgcccggaacatcgcccgctacggcggtatccaacacgatcacgacgtccggtttaatgtgttccgcgctggtttgcgccccgcgtagcccaacttcttcttccacactgccaacgccatacagcgtaatttcgggattattcaccgtctgcaatagttcagccatcattgcgcagccgatgcggttatccaacgccttgccgaccactttatcttcgccccagcaggcaaaattggcttccgggctaataaaattaccaatttccacgccgcgcttttccacctcttcgcgactgttcgcgccaatatcaatgaacatctcatcaaaactcagcggttgttgcttttgcttttccgttaacgcatgaggcgcgacggaaccaatcacaccagggattttcactcccttgtgtgtgcgtatggttacccggtggttgagcatgctctgattccaccagccgccaatggtggtaaaacgcagaaaaccgctctcgtcgatgtgggtgaccataaagccgacttcatccatatgtccgacaacggcaacttttggacctttattccccttacgggcaacaaagctgcccagaccatcgaaggtgatttcattcacgcaaggttccagcgtgtttatcagaatgtcgcgaacttcctgttcatcgccgctgacggcgctggcttcgcacaactgttgcagtaactcaatgttcatggacaagctcctgttgcgcggctttcgctttgcggcgtaaccacaatcctttcaggacgataatgaaactaatgttcagcgcgaggccaatcgccagcaccagataaaagctacccaccgggctcatcaggccgatcagcgggtcaaagatacccaaaccaggtgccagacgtttgattccgaaagcgatcaccagcacgccggtaatgccgcccgccagcgtattggcggtaatcatcggcaacggagctgccagagcgtaaggaatagccggttcggttgcgactgtggcaccgaccacaatggcactactggcagcctctttttcctgtcgggtaaacagtttgggcgcaatgaacgtcgcaagacccgccgcgacgggcggcatcagcgcgacaacgccgacgatggcgtaccagtcataaatgtgtttttccagcagactgaagcagaagaaccaggcggttttattgatggggccgcccatatcgaacgccagcatcgcaccgaccagaaacgctgccgcaaacttcatacttggaggaatggtattcaggaagtggagcagcccgcccatgaggtcggacatcaccggcccgataacgtagtaagtgagcacgccgaaaaccagcagagtaacgaacgggatcagcatactaccgagcagcggttgtaatgctttgccaaggcgcactttgcggaaccagaagacgaaatagccaatcgccagccccagcaccaccgcgccgaggaatcccgcaccgctctgggtgccgagcagcgctttgtcgttcgccagatagcaaaccagaaacgccggagcgaaagccggtttatcggcaatgctgctggcaatataagcgcccatgatggggatcataaaggtgaagccaaggtaaccgatggattcaactacccaggtaaagctcggcgcgcctttgctcatatcggtatacggcaaaccgaactgcaccagcatgttggcaagcgccaccaggataccaccgccgatgacaaacggcagcgccgcagagacgcccgccatcaggtggctcatcacgctaccgctttgcacttcctgtttgccaagcttcacgccgctatctgcggcaaaaagctggctgtttgtcggtaattcgctgaaaatctggtcgatatttttcaacgcctgggagatggcaatctcataaactttcttcccggcaaaccgcgcgcgatcatcaccgctcaggccacgcccggtagcgagaatgacgtaatcggcagcggcaatctcttcgctggataagcggttttcaacgccactggacccttgagtttccacttttatggtatgaccgagagaacgggctttctgttccagggcttccgccaccatgtaggtgtgagcgatcccggcggggcagttggtgatcgcgacaatacgtaaggaactctccatcgccacttccttaactgctgagggtttgatttaacaaggcaagcacctggtcggtatcgccctgttgcagttgatgaataaattccttgtgaataattttgcgacacagtgtgccgatgattttgacctgatcctcttcgccgctttgcggcacgccgaggcagatccagcaattgacgtcttcgccatcgctggctttccagtcaatagcctgcgctttgcgggcgaataatacgaacggttgtttaacgcaggcgcttttaccgtgcggcacggcgacaccggaaccaaatccagtagagtgcattttttcgcgcagcagcagggtttgcaggaactggtgactgtcggtgataaaaccgttttgtaacgctattgtcgccaactgcttcagaacggaataagcgccattgccctgaatattcaggtcaatacagcttgcagtaagagctgccattaatcggactccataaaatatattttaatcaattgtaatggtggagcgattaagtgatgagaggcgatatgtcggtaaacaatgacaatttgagacagagtgaaaggtcagatttgcggagtaatgcacataatggttatttaaataaaccacatgaatcattaatgggttattcattatttttgtgatttactcacaatgtatcagggaaatataacttaccgggagatgtaatatgtttaatttttcaaatcgaaatttaaaatattgtgccggaggcatctctggcacattgggcaattacggcaggtaaaacacttcttgcagctcgctactcaccgggctgttatccgggttagcgggcataacatcggtcatatatttccaccaacgttggcagacatcagtgctggcaaccgcattccagcgttcttcagattcaatctctaccatggcaaacagcagattacgcgctttgtcgagatagatggcgtagttatgcgcaccgtgagatttcagcactgcttccagttctggccagatgggattatgccgacgctgatactcttcgtgggcgtcggggtttacctgcatgacaaaggctttgcggatcatgtttgctccttacagcgccagcgcactggcgagtggcgtaacgccgaaacgcttgccgagcgctatcaactcttcacggctgatggtctgtttcatgccgcccatgctataaaccttcactaatacttgtgcacttttttctgcggtgtcgattaaaccgaaggtttcatccagcgtcggtccgctgccgaagacgccgtggaagggccacaacaccaggctatgtttttgcatctcttgtgcggtcgcctggccgatttcgtccgtgccgggcaccatccacggcaaaatgccaacgccatccgggaataccaccagacactcggtgctgccttcccacagttggcgagtgaagaccgcggtgtcgttttcaagtacataggtgagggcgatcaggttggtggcgtggcagtgcatgatcacccgatctttgccgttggtggctttaatgcgctcgcagtgggaaaggaagtgagccggaagttcggaagtggggacggcttcgttggttaacccccaaagaatgtggtagcccgcgccgtcgctgtcgacttttacgatgcctaagttagccgcaggatcaagctggacgttacggaagaatttgccgctgccggtgacaataaacggtgtatttgccagtaaaggcatgggctggctgagcgggatatagcgcggttgttggtggaaattgtcgtgatatggtgcgatatcggcgtcatccaggcgtagcgtcaggttgccgccgttgcgctcatcccagcctttcagccaggcgtcggtggtggctttgatcattccctggacaaaccaggactgagtaatgttttgcatgttctgtgttcctgtaaattcggtgttgtcggatgcacgacccgtaggccggataaggcgctcgcgccgcatccggcaatcaatgcctgatgcgacgctgtcgcgtcttatcaggcctacaactattgccgacctgtaggcctgataaggcacttgtgccgcatccggcaatcaatgcctgatgcgacgctgtcgcgtcttatcaggcctacaactgttgccgacctgtaggccggataaggcacttgtgccgcatccggcaatcaatgcctgatgcgacgctgtcgcgtcttatcaggcctacaactattgccgacctgtaggccggataaggcacttgtgccgcatccggcaatcaatgcctgatgcgacgctgtcgcgtcttatcaggcctacaactgttgccgacccgtaggccggataaggcgctcgcgccgcatccggcagtgtttacccgcggcgactcaaaatttctttctcataagcccgcacgctctccagccattcgctacctgctggcgtatcgtgacgttggcaatacatttcccagaccgcctgccacggcaagcttttctgctcttccagcagtgccagacgcgcagtgtaatcgcccgccgcttccagcttgcgcagctcagcggtaggttccagcaacgcacgcagcagggcttttttcatattgcgtgtaccaatgacccacgcggcaatgcggttgatagaggcatcgaagaagtcaaggccgatatgcacccggtcaaacagatcgtgacgcacaatctcactggcaattgcctgggtttcatcatccagcagcactacgtgatcgctgtcccagcgaaccggacggctgacgtgcagcagcaactgcggcacatacagcatggcggcggaaatcttgtcggaaatcacttcagtcgggtggaagtgcccggcgtccaggcacagcgcagtctggcggctggtggcataccccatgtaaaactcattggagccaaccgtgtagctctctgcgccaatgccaaacaatttgctctcaacggcgtcgatatggtgcgcagggtttagcttctcgctgatcacctcatccagtgctgccagcagacgctgacgcggggcgagacggtcaacggtgatatctttcataccatccgggatccagatgttcatcacgcttggtgtgccgagttgctcgccaaaataggcgctaacgcgacggctggctttgcagtgatcaatccagaactggcgaatgctgtcgtcggcatgggaaagcgtaaagccatcggcgcttagcggatggctaaagcaggaggggttaaaatccagaccgagctgattggctttcgcccattcaacccagtttttgaagtgctctggtttgatctggtcgcggctgactggcgtatcactttccagatagatggcatgtaaattaagccgtttcggccccggaatcagccgcatagcctgttccagatcggcacgtagctcactggcattacgcgctttgcccggataattgcctgtggcctgaatccccccggtcaggctaccttccgggttttcaaaaccggaaacatcatcgccctgccagcagtgcatactaacgggtaaacgatcaagttggcgcagcgcctcctcgacatcaatccccaccgccgcgaaacgctgtttcgctagctcccaggcctgttccagttgagtggtcatgcgcaaagctcctttgtctgtcgtgtagagtgaatctgcgccacatagtgggcaatttcactgtcaggattaggggtaaaggtggtcagattcgcggtggtgctgacgacctgacggaaatcatccacattgttgagttcatccagcgtcattaactggatgccgatattgccgagcgtgctggcttcaacaggcccggcgatcacccgaataccgcaggcatcggcgcatagctggttgagcagcgtgttctggcagcctccgccgacaatatgcagttggctgaaatcttcaccgcgcagctgcgccagctcatgcaacacatcggcatacagcagcgccagactgtcgaaaatgcagcgcgccagttcagcatcactttccgggatcggttgcgccgtttcccgacacgcagcctgaatttcgctgcacatcgtctcaggattaataaagcgatcgtcattgggattgataatgaagcggcaagccggaagtgcctgtgtcgcggagataagcgccggaagatcgttgatttgctgctcctgaagcactcgctgaagcagccataagcccataatatttttcagcacccgatagcgaccttccgccccgccttcattggtgatgttggctgccagtgccgtgtcattggtaaatggcgtctggctttcgaagcccatcaaactccaggtgccagaagagagataagcagcacgactgccgtttaacgggctggcgataaccgcgctggcggtatcatggctggcaacggcgaccactggaatctcattaccctgcgggcaaatccagtgacctatgacattacccggatgcgtcgggcgaccaaaccaggctttgttggccccgctccacgccagtaggctctcgtcccagtcgtcgctattgatattgaccagttgcgtggtcgtggcgttggtatattcccagttcatcttgccggtcaggcgataactgaagtaatccggcatcagcagagcgtgagcaatgtgtggaataagttcaggttgttgctccgtcagcgcacgcaactgataaagcgtattgaagggcagaaactggatgccgctacgttgataaatatcgcgtttgccgagttgttgttgtgcctgcgccattaggccattggtgcggctatcgcgataagcaacgggcaggcccacacgctgaccctgttggtcgagcagcacaaagtccacgccccaggtatcaatcccaatgctatcgatacgaatcccttcctcgcacaccttgtttaatccaaggcgaatggcactttcaaggctatccacatcccaggtgacatagccgttctgactatgcagcccattgttaaaacgatggatttcgcgcagcgtcaggctgcggcattcacgctcgtaacgcgccagcatcacgcgcccactggatgcgccgagatcgacggcgacacaattgcgaaaggtcataatgtgatcctgctgaatttcattacgaccagtctaaaaagcgcctgaattcgcgaccttctcgttactgacaggaaaatgggccattggcaaccagggaaagatgaacgtgatgatgttcacaatttgctgaattgtggtgatgtgatgctcaccgcatttcctgaaaattcacgctgtatcttgaaaaatcgacgttttttacgtggttttccgtcgaaaatttaaggtaagaacctgacctcgtgattactatttcgccgtgttgacgacatcaggaggccagtatgaccgtattacatagtgtggatttttttccgtctggtaacgcgtccgtggcgatagaaccccggctcccgcaggcggattttcctgaacatcatcatgattttcatgaaattgtgattgtcgaacatggcacgggtattcatgtgtttaatgggcagccctataccatcaccggtggcacggtctgtttcgtacgcgatcatgatcggcatctgtatgaacataccgataatctgtgtctgaccaatgtgctgtatcgcagcccggatcgatttcagtttctcgccgggctgaatcagttgctgccacaagagctggatgggcagtatccgtctcactggcgcgttaaccacagcgtattgcagcaggtgcgacagctggttgcacagatggaacagcaggaaggggaaaatgatttacccagcaccgccagtcgcgagatcttgtttatgcaattactgctcttgctgcgtaaaagcagtttgcaggagaacctggaaaacagcgcaagtcgtctcaacttgcttctggcctggctggaggaccattttgccgatgaggtgaattgggatgccgtggcggatcaattttctcttagtctgcgtacgctacatcggcagcttaagcagcaaacgggactgacgcctcagcgatacctgaaccgcctgcgactgatgaaagcccgacatctgctacgccacagcgaggccagcgttactgacatcgcctatcgctgtggattcagcgacagtaaccactttagcacgctttttcgccgagagtttaactggagtccgcgtgatattcgccagggacgggatggctttctgcaataacgcgaatcttctcaacgtatttgtacgccatattgcgaataatcaacttcgttctctggccgaggtagccacggtggcgcatcagttaaaacttctcaaagatgatttttttgccagcgaccagcaggcagtcgctgtggctgaccgttatccgcaagatgtctttgctgaacatacacatgatttttgtgagctggtgattgtctggcgcggtaatggcctgcatgtactcaacgatcgcccttatcgcattacccgtggcgatctcttttacattcatgctgacgataaacactcctacgcttccgttaacgatctggttttgcagaatattatttattgcccggagcgtctgaagctgaatcttgactggcagggggcgattccgggatttaacgccagcgcagggcaaccacactggcgcttaggtagcatggggatggcgcaggcgcggcaggttatcggtcagcttgagcatgaaagtagtcagcatgtgccgtttgctaacgaaatggctgagttgctgttcgggcagttggtgatgttgctgaatcgccatcgttacaccagtgatagcttgccgccaacatccagcgaaacgttgctggataagctgattacccggctggcggctagcctgaaaagtccctttgcgctggataaattttgtgatgaggcaagctgcagtgagcgcgttttgcgtcagcaatttcgccagcagactggaatgaccatcaatcaatatctgcgacaggtcagagtgtgtcatgcgcaatatcttctccagcatagccgcctgttaatcagtgatattagcaccgaatgtggctttgaagatagtaactattttagcgtggtgtttacccgggaaaccgggatgacgcccagccagtggcgtcatctcaatagccagaaagattaattcgccatgccgatgccgacgatgttagcggcgacaataatcaccacacaaccgaggctcaacaccgttaccggacggcgtcctgcattgttccactctttcagcaccagcccgacgataccgccgcacaatacatagaaactcatatgcagcatccaactgatgtagtcatactgcgccggaatgcgggcgtggccccaggcatagaaaaagaattgcagataccacatcaacccgcccagtgtgctgagtaacacattgtgaatgatcaggctttttgccaggctgaagtcggcttttaggctcaaatccttcacttttgccagacgaataaaacagaaaccgaggttaatgatcgcgccgccgcccatgatgacaacatagcttggcagagcgacatacagtggatcgacgccaagtgcggcagcggcttcatgcatcggttttgcggcgttcatcgcaaaggacatcccggcagagaaaatgccgcacatcaccgccagcaccagcccttttttcagattgaactcttcggctttaatgcccatcttgcgctctttcaactgcccggcgcgagttacaatccctacgccaatcagcgccaccagaacgccgagcaacgtcatgcgtccgccttcggtgctaatcaacacatcgaaattgccgttgataattggcgtcatcagcgtaccgacaatcaacgtaatgccaatggcgatgccaattcccatgctcatgccgagataacgcatggtcaggccgtagttgatattaccgatcccccacatagcgccgaacagaaaaacaggcagtcgcgtagagagactaaagctgctgtaatacgcccagaaattcggtagtaacagggcgctgatggcccacggcagaataatccagctaacaatcccaccgacactccacatggtttcccaactccatttttttacttttttgaacggagcgtaaaaacaggctgcactggccgcgccgatcaaatgccaaaatatccccatcgtaatcgcgttactcatcttcttatcctcatcatttttcgtcgcgtcacatctccgacgagatgagtgtaaaaatcgtgctgtcgattaacctttcgcctgttgccgccgttgtcgatttactggcaatcacggcattaagtgggtgatttgcttcacatctcgggcattttcctgcaaaaccatacccttacgaaaagtacggcattgataatcattttcaatatcatttaattaactataatgaaccaactgcttacgcggcattaacaatcggccgcccgacaatactggagatgaatatgagctataccctgccatccctgccgtatgcttacgatgccctggaaccgcacttcgataagcagaccatggaaatccaccacaccaaacaccatcagacctacgtaaacaacgccaacgcggcgctggaaagcctgccagaatttgccaacctgccggttgaagagctgatcaccaaactggaccagctgccagcagacaagaaaaccgtactgcgcaacaacgctggcggtcacgctaaccacagcctgttctggaaaggtctgaaaaaaggcaccaccctgcagggtgacctgaaagcggctatcgaacgtgacttcggctccgttgataacttcaaagcagaatttgaaaaagcggcagcttcccgctttggttccggctgggcatggctggtgctgaaaggcgataaactggcggtggtttctactgctaaccaggattctccgctgatgggtgaagctatttctggcgcttccggcttcccgattatgggcctggatgtgtgggaacatgcttactacctgaaattccagaaccgccgtccggactacattaaagagttctggaacgtggtgaactgggacgaagcagcggcacgttttgcggcgaaaaaataatcatttgccgcctgctgcaatgaggcgtataggccgcatatcagcttaaaaaatgaaccatcgccaacggcggtggtttttttgtgatcaatttcaaaataaaaacaatgatccgataaaaataaaacagcgtttcaattgatgtggttttgatcacttttattgattaaatgaatgtctatcttcgtttccatcaacactgatgctccattgaggaattacgcatcagcccttaaaaatatgccgacaggtgatggaaatgcagataaaacgcagcattgagaaaatcccgggggggatgatgctcgtcccgctattccttggcgcactgtgccacaccttcagcccgggggcggggaaatattttggaagtttcaccaacgggatgattaccggtacggtgcccattctggcggtgtggtttttttgcatgggggcgagtataaaattaagcgcgacgggaacggtactgcgtaaatccggtacgctggtggtaactaaaattgccgtcgcgtgggtggttgcggcaattgccagccgtattattccggaacatggtgttgaagttggattctttgccggacttagtacgctggcgctggtggcggcgatggatatgaccaatggcggactttacgcttccatcatgcagcagtacggcacaaaagaagaagctggggcatttgtgttgatgagcttggagtccgggccgctcatgacgatgattattctgggcactgccgggattgccagctttgaaccgcatgttttcgtcggcgcagtattaccgttcctggtgggctttgccctggggaaccttgaccctgaattgcgagaatttttcagcaaagcggtgcaaacgctgattccattctttgccttcgcgctgggcaataccattgatttgactgtgattgcccagactggtttgctggggatcctgttgggtgtggcagtaattatcgtgaccggtattccgttgattatcgccgataaattgattggcggtggcgatggcactgccggaattgccgcttccagttccgcaggggccgcggtagcgacacctgtgctgattgcagaaatggtgcctgcgtttaaaccgatggctccggcagcaactagcctggtagcgacggcggtcattgtgactagcattctggtgccaattcttacctctatctggagtcgtaaagtcaaagccagagcagcgaaaatcgaaattttaggtacggtgaaataaacctgcttccttaatccccacagccggatgaactaacgttcgtccggtttgctattgagttcctgcctggatacttaccgcgaaaacagcacgcctgacataaaataaatatggtctaatggggaaatttctcgtggagagggaacagatgcgatatccggttgatgtatacacaggcaagattcaggcttatcccgaaggcaaacccagcgcaattgctaaaatccaggttgatggtgagttgatgctgacggagctggggctggaaggtgacgagcaggcggagaaaaaggttcacggcgggccagacagagcgctgtgtcattatcctcgtgagcattatctctactgggcgcgggaatttccggaacaggcggagttgtttgttgcgcctgcgtttggtgaaaacctcagtaccgacggcctgacggaaagtaatgtttatatgggcgatattttccgctggggagaggcattaattcaggtcagccagccgcgcagcccttgctataaactcaattaccattttgatatcagcgatatagcgcagttgatgcaaaacacaggtaaggtggggtggttgtatagcgtgatagcgccagggaaagtgtctgcggacgcgccgctggagttggtttcccgtgtcagcgatgtgaccgtgcaggaggctgccgccatcgcatggcatatgccgtttgatgacgatcaatatcaccgtttactctccgctgccgggttaagcaaaagctggacgcggacgatgcaaaagcgccgactgagcggcaagatcgaagatttttcccgccggttgtggggaaaataacccccggagtgtaggcctgataagacgctatcagcgtcgcatcaggcatcctgctcaaatgccggatgcggcgtaaacgccttatcctgcctgcaaatgcgaagtttaactccgcttatacagcggcaaccaaatcaccagccgtaaaccgcccagcgggctgtcttctgccttcacccagccacgatgctgctgaatggcggtttcaacaatcgccagccccaaacctgtaccgccagattcacgatcgcgtgcttcatcggtacgatagaacggacggaaaatctgttcgcgatcttccgggctaacgccaggaccatcgtcgtccaccgtaatggtgataccgtctttatctaccgcaaagcccacttcaatcttcgtatgggaataacgcagagcattacgaacaatgttttccagcgcactttccagggcgttcggattgccgtacagcggccacggcccaggcgggaagttaactgtcaagctcttgcccatttgctcggcttcgaacgccgcgttatccagcacttcactccacaactggttggctttgatggtttcgctaaccagcgcgtttttttgctgattacgactcatcaccaacagatcgttgatcatgctgtccagacgttgcgcttcggtttcaatacgctccagttccttgctttcaccgctacgacggcgcagtaacgccgtacccagttgcagacgcgtcagcggggtgcgcagctcgtgagagatatcagaaagcagacgctgctgagaggtcatcatgcgctccagcgcggtgaccatctggttaaaactggcacctgcggcaaggaattcctgtggccccgcttccagttccgggtgctggcgtaagtttccctgggcaacttcatcggcagcgtttttcagcttacgcgccggttttgccagactccaggccaaccacaacagcagcggcgtactgaccaacatggtgacaatcagcagtaatagcgggcggtcaaacagtaagttaatgaaatcggattgagaactgctggccggacgaatcagataaagttggtaattatcttcgccatcacgcacggagaacggaccgaccagttccacgcggccatactttttcttctgcggatgatcggcgttatcggcctgaccaataaagttacgaatgatctgcatttcgctgcgttcagcgccgatcacgcggccttcggtggtcaccaataacaaacgctgtcctggcggtgcccacttatcaatcgcccggaacagacgccgccaccacattaaatcgttgggcggatcgttcgccagctccgcttcgacatgctgctcaatcatcagcccctgacgctgttcgctatccagaagctcggtcatctggcgactatcgagcttgggtaacatcaaaaccaacatcaacaccagcgccagcgtcagccagaagatggcgaagatgcgcgcggttaagctgcctatcatgaagcagaaaccatcagatattagctcaactagcagaaaccatcagatagccgcgaccacgcaaggttttaaaccacgggtgaccatctttacgatccggcagtttacgacgcaggttggaaatgtgcatatcaatagcgcggtcgaaaggcgtcaggcgtttgcccaacacttcctggcttaaatgttcacgggaaaccacctgacccagatgctgtgccagcaaatagagcagggtaaactcagtaccggttaactccagcgtttgcccgtcgaagctggcttcctgacggcctggattcagcactaaggcatcaacttccagtgtcggactaccgttgtcgttgttttgctgttgctcgctccagtggctacggcgcaggatcgcgcgaatacgtgccaccagctcacgatcattaaacggtttcgggagatagtcatctgcgcccagctcaaggccgagaacgcgatcaagttcactgccgcgcgccgtcaacataatgacaggcgtctggtgtgtctggcgaagtgcttttaatgtgtcgataccatttttcttcggcatcattacgtcaagcaaaagtaaatcaatgctgtcgtccagaagatcaagcgcctgttccccatcgtgggcaacaatcacgttgaagccttccatctcgagcagctcctttaatagggaagtcagctctcggtcatcatcaactaacaggattttattcattgtttaaatacctccgaggcagaaattacgtcatcagacgtcgctaatccatgactttacgttgttttacaccccctgacgcatgtttgcagcctgaatcgtaaactctctatcgttgaatcgcgacagaaagattttgggagcaaatgatgcgcatagttaccgctgccgtcatggccagtacgctggcagtcagtagtttaagccacgctgctgaagtcggtagtggcgataactggcatccgggtgaagaacttacgcagcgcagtacgcagagccatatgttcgacggcataagtttaaccgaacatcagcgtcagcagatgcgagatcttatgcaacaggcccggcacgaacagcctcctgttaatgttagcgaactggagacaatgcatcgccttgtcaccgcagaaaattttgatgaaaacgctgtgcgcgcacaggcagaaaaaatggcgaatgagcaaattgctcgtcaggttgagatggcaaaagtccgcaaccaaatgtatcgcctgttaacgccggagcagcaagcggttttaaacgagaaacatcaacaacgaatggagcagttgcgtgacgtgacgcaatggcaaaaaagtagtagcttgaagctattgagtagtagcaacagtcgttcccagtaataaaccctgttttccttgccatagacaccatccctgtcttcccccacatgctgtgggggttttttttatcctcaatttgcctgctgcttaatgcattgcagatgatttgcttccgttatactagcgtcagttgatagcgggagtatttatgaatcaatcttatggacggctggtcagtcgggcggcgattgctgcgacggcgatggctagcctgctattgctgattaaaatttttgcatggtggtataccgggagcgtgagtattctcgccgcgctggtggatagcctggtggatatcggcgcgagcttgacgaatttattggtggtgcgatattccctgcaacctgccgacgataatcacagctttggtcacggtaaagctgagtccctcgcggcgctggcgcaaagtatgtttatctccggtagcgcactattcctgtttttgacgggtattcaacatctgatatctccaacaccgatgacagatccaggcgtcggggttatcgtgacaattgtggcgctaatttgtacgattatccttgtcagctttcagcgttgggtggtgcggcggacgcaaagccaggcggtgcgggctgatatgctacattaccagtctgatgttatgatgaacggcgcaattctgctggcgctggggttgtcctggtacggctggcatcgcgccgatgctctgtttgcattgggaatcggcatctatattttatatagcgcgttacgcatgggatatgaggcggtacagagtttactggatcgcgcattgcctgatgaggaacggcaagaaattattgatatcgtgacttcctggccgggtgttagcggcgctcacgatcttcgcacgcggcagagtgggccgacccgctttattcagattcatttggaaatggaagactctctgcctttggttcaggcacatatggtggcggatcaggtagagcaggctattttacggcgttttccgggaagcgatgtaattatccatcaggacccctgttccgtcgtacccagggagggtaaacggtctatgcttagttaatcagtataaaagagagccagacccgcattttgtgtataaaataccgccatttggcctgacctgaatcaattcagcaggaagtgattgttatactatttgcacattcgttggatcacttcgatgtgcaagaagacttccggcaacagatttcattttgcattccaaagttcagaggtagtcatgattaagaaaatcggtgtgttgacaagcggcggtgatgcgccaggcatgaacgccgcaattcgcggggttgttcgttctgcgctgacagaaggtctggaagtaatgggtatttatgacggctatctgggtctgtatgaagaccgtatggtacagctagaccgttacagcgtgtctgacatgatcaaccgtggcggtacgttcctcggttctgcgcgtttcccggaattccgcgacgagaacatccgcgccgtggctatcgaaaacctgaaaaaacgtggtatcgacgcgctggtggttatcggcggtgacggttcctacatgggtgcaatgcgtctgaccgaaatgggcttcccgtgcatcggtctgccgggcactatcgacaacgacatcaaaggcactgactacactatcggtttcttcactgcgctgagcaccgttgtagaagcgatcgaccgtctgcgtgacacctcttcttctcaccagcgtatttccgtggtggaagtgatgggccgttattgtggagatctgacgttggctgcggccattgccggtggctgtgaattcgttgtggttccggaagttgaattcagccgtgaagacctggtaaacgaaatcaaagcgggtatcgcgaaaggtaaaaaacacgcgatcgtggcgattaccgaacatatgtgtgatgttgacgaactggcgcatttcatcgagaaagaaaccggtcgtgaaacccgcgcaactgtgctgggccacatccagcgcggtggttctccggtgccttacgaccgtattctggcttcccgtatgggcgcttacgctatcgatctgctgctggcaggttacggcggtcgttgtgtaggtatccagaacgaacagctggttcaccacgacatcatcgacgctatcgaaaacatgaagcgtccgttcaaaggtgactggctggactgcgcgaaaaaactgtattaatgatttcggaaaaaggcagattcctttaccctgaaaccgatgacagaagcaaaaatgcctgatgcgcttcgcttatcaggcctacatgaattctgcaatttattgaatttgcaaacttttgtaggccggataaggcgttcgcgccgcatccggcatggacaaagcgcactttgtcagcaatatgaggcggatttcttccgcctttttaatccctcaacatatacccgcaagttatagccaatctttttttattctttaatgtttggttaaccttctggcacgctttgctcatcacaacacaacataagagagtcgggcgatgaacaagtggggcgtagggttaacatttttgctggcggcaaccagcgttatggcaaaggatattcagcttcttaacgttagttatgatccaacgcgcgaattgtacgaacagtacaacaaggcattcagcgcccactggaaacagcaaactggtgataacgtggtgattcgtcagagtcacggtggcagtggtaaacaagcgacgagcgtaatcaacggtattgaagctgatgttgtcacgctggctctggcctatgacgtggacgcaattgcggaacgcgggcggattgataaagagtggatcaaacgtctgccggataactccgcaccgtacacttccaccattgttttcctggtacgtaagggaaatccgaagcagatccatgactggaacgatctgattaaaccgggtgttagcgtgatcacgcctaatccgaaaagctctggtggcgcgcgctggaactacctggcagcctggggctacgcgctgcatcacaacaacaacgatcaggcaaaagcacaggattttgttcgggcactgtataaaaacgtcgaagttctggattctggcgcgcgtggctccactaacacttttgtcgagcgcggaattggcgatgtactgattgcctgggaaaacgaagctctgctggcagcgaatgaactggggaaagataaattcgaaatcgtcacgccgagtgagtctatcctcgcagagccaaccgtgagcgtggtcgataaagtggtcgagaaaaaaggtactaaagaggtggcggaagcctacctgaaatatctctacagcccagaaggtcaggaaattgccgcgaaaaactactaccgtccgcgcgacgctgaggtggcgaaaaagtacgaaaatgcgtttccaaagctgaagttattcaccattgatgaagagttcggcggctggacgaaagcgcaaaaagagcattttgctaacggcggtacgttcgatcagatcagcaaacgctgatttccccaggataattatcaaacccggtggtttctcgcgaccgggttttttatttgtcacgattttgcgttacccttgcatctctttgaggtacagggaaaaaaagatgaaaaaagcgggtcttctttttttggtgatgatagttatcgccgttgtggctgccggtattggttactggaaattaaccggtgaagagagcgatacattacgtaagattgtccttgaggaatgtttgcccaatcagcagcaaaatcaaaatcctagcccatgtgcggaagtcaaacccaatgccggatacgtggttttaaaagatcttaatggcccactgcaatatctgttgatgccaacgtatcgtattaacggtactgaaagtcctttgttgaccgatcctagtacgccgaacttcttttggttggcttggcaggcgcgtgattttatgagcaaaaaatacggccagccggttcccgatcgcgcggtttctttggcgatcaactcccgcaccgggcgtacgcaaaaccattttcatattcatatctcttgtattcgtcctgatgtgcgcaaacagctggataacaatctggcgaacatcagcagccgctggttgccactgccaggtggtttgcgcgggcatgaatacctggcgcgtcgggtaacggaaagcgaactggtacaacgcagcccatttatgatgctggcagaagaagtacctgaggcgcgggaacatatgggacgctacgggctggcgatggtacggcagagtgataacagttttgtattgctggcgacacaacgaaatctactgacgcttaaccgtgctagtgccgaggaaattcaggatcatcagtgtgagattttgcgttaaggcgaagagttaaggaaagtaagtgccggatatgaaatccggcacctgtcagacttaagcctgtttagccgcttctgcagctttaacgattactgcgaaggcgtcagctttcagagaagcaccaccaaccagcgcgccgtcgatatccggctgagcaaacagttctgcagcgttagacgcgtttacagagccgccgtactgaatgatcacttgttcagcgatgttagcgtcaactttagcgatgtggtcacggatgaatttgtgaacagcctgtgcctgagccggagttgcagatttgccagtaccgattgcccatacaggttcgtaagcgataaccgcaccttcgaatgccgcagcaccctgagttttcagtaccgcgtcgatctgacgtgcgcaaacttcttcagttttgcccgcttcattttcagcttcggtttcaccgatgcacagaaccggagtcaggccctgctctttcagcaccgcgaattttttcgcgatcagttcgtcagattctttgtggtaagtacgacgttcagagtgaccgatgatgatgtactgtgcgccgatgtctttcagcatagcagcagaggtttcaccggtgaatgcgccggacaggttcaggtccacgttttgcgcacccagcatgatgtggctgccttcagcttcgcgcttcgccatatcgatatacatttccggtggtgcgattgcaaccgcacagccagcaacacctgccagctctttacgcaggttagaaaccagctcgtgaaccatgtggcggctgccgttcagtttccagttacccatcactaaaggatgtcgcattttaattctccacgcttataagcgaataaaggaagatggccgccccgcagggcagcaggtctgtgaaacagtatagagattcatcggcacaaaggctttgctttttgtcatttattcaaaccttcaaggctttcagatagcgccagcttaatcggttcaacagcgaaggtcagccccttttcgccgttgtccgcgacaacataacgcagtgcaccttctgtctcggtgtaataacgtttgtttttccccgccgttagtaggctctgcagttttttctggctttgtgttttggtcattaatggggtgagtgtgcggatcaccgctgccatgtattcctgagctttcgctttcgcggctttttgctctggcccctggatgggtagccaggtcatttgaatgcttttgatttttaaggtaccgcgctccagcgctgtagaagcatacaagttctcattaattttacttgcagcacgagtgagattggctttgtcgggactgctgtcgatggcacgaaattcgttcagtggcaggctgggattctggctgttaaagtcttctcgaaactggctgatggagagatcgaaagtaggggctccagccagcagataaggcgcggtcgttgccgtatctggtgtttgtgcatgcgcctctgttgtaacggttaatgcagaacataagagaaaaaacagcgtacaccctggcttcattgacagtaccttttgttatgactggctccgattaaaacgatatctgtcgcccttgtcaaaagggtagaatcctggaaaagacaaccatcaaggaacttacatgaccatacagcaatggttattcagttttaaagggcgtattggacgccgtgatttctggatttggataggcctgtggttcgcaggcatgctggtgcttttcagtctggcgggtaagaatctactcgatattcagaccgcggcgttttgccttgtgtgcttgctctggccaacagcggcagtaactgttaagcgcttgcatgatcgcgggcgttccggcgcatgggcatttctgatgattgtggcgtggatgctgctggcgggtaactgggcgattttaccgggtgtctggcaatgggcggtggggcgttttgtcccgacgttgattctggtgatgatgcttatcgatcttggtgcgtttgttggcacacaaggcgaaaataaatatggtaaagatactcaggatgtgaagtataaagccgacaataaaagtagtaattaacctttaatatatctcttactgctatttttttccgggattgttatttccacgatgcaaatgacaatacccggaaaatccttctgaactcttcaccttaagcaatatcaaaaaaaatggtaatccataagatcattacttgtttgttcttcccttaacggcgcattattcttaagtcgtaatcgacagagaggcgaatatacagaggtgccctatgaaagatgtcgtagataaatgcagtactaaaggatgtgcgattgatatcggtacggtgattgataacgacaactgtaccagtaagtttagccgcttttttgccacccgcgaagaagcagagtcttttatgaccaaactgaaagagcttgccgccgctacatcctctgcagatgaaggggccagcgtggcctataagattaaggatctggaggggcaagttgagcttgatgcggccttcactttcagttgccaggccgagatgattatttttgagttaagtctgcgtagcttagcttgatggagttgctttagaaggagttaaacatggcttataaacacattggcgtggcaatttccgggaatgaagaagatgccttactggtgaataaagccctggagctcgccagacataatgacgctcacctgacgttaattcatattgatgatggcttaagcgagttgtatccgggtatctacttccctgcaacagaagatattcttcaattgttgaagaataagagcgataacaagctgtataaactgacgaaaaatattcaatggccgaagacaaaactgcgtattgaacgcggagaaatgccggaaacactgctggaaattatgcaaaaagagcagtgcgacctccttgtctgtggtcatcatcacagttttatcaaccgtttgatgccggcatatcgcgggatgatcaataagatgagtgcggatttgctcatcgtgccgtttatcgataagtaaccgcttaccagtaatgctccgctgtcatatggcccggtcggcgacgtaaatgtttcgtcatctgccgggtctctttcagcaactgttgtgtatcgcgcaccatctgtggattgccgcacagcatcacatggctggtttctttattcatcggcaggccaatcgtgctttccagttccccactttcaattaatgccggtatccgtccggtgaggctccccgctgccgtttcccgactgaccaccgtctgaatgcgcagttttccttcgtagcgtttttccagttcctgcatcagtggcaaatagcttaagtcggcggcataacgtgcggcgtgcaccaggaccagatttttgaagcgatctaaatctttacctagttgcagaatgcttaaataagggccaatcgctgtaccggttgccagcatccatagcgtttcgcagtgcggcacttcatcgagcacaaagaatcctgccgcttcgctaaccacctgcacttcatcgcctggtttcagtgccgccagtcgtgggcttaatttgccatcggggacggtgaccaggtaaaactccagatcgggattatcggggctgtttacataggagtaggcgcgctggacgcgttcgccgtcgatttcaaggccaagcttggtaaattgcccggcggtaaacggaagcacgggggcgtgaacggtgagactaaacagggcgtcggtccagttctgcactttagtgactttgcctgttacccaatcagccatgtttttctcctgttttgattgacttgccttatcttcgttctccgaacaaaaaaattccagtcccgaaggactggaaggctcaatcgatcaaatcaatcagaggatgtgcacctgcatttccgggtctttgcgatccagatagtggatggactgaatgcggcgaatggtgcgactcttgccgcggatcagcagcgtttcggtagtcgcgatattgcctttgcggctaatgccttccagcagatcgcctttggtaataccggtggcagagaagatgacgttatcgctgcgcgccatatcgcccaggcgcaatactttaccggcttcgatgcccatcgctttgcagcgtgccagctcctgctcgccaatgcgacgattctcttcgttgtcgcctttgacgtcatgacgcgccagcagacgaccgttcatgtcgccatctaatgcgcggatcaccgccgcagaaactacgccttccggcgcgccaccaataccgtacagcacgtcaacttcgctgtctggcatacaggtgagaatactggccgcaacgtcgccgtccggaatagcaaatacgcgtacgccgagttgctgcatttcagcgataacggcatcgtggcgtggtttagccagaatcgttaccgtcagttcgctcaacggtttgccgagcgccgccgctacattgcgcaggttatccgccagcggcaggttcagatcaatggtgcctttggctcccggcccgacaatcagcttctccatatacatatccggcgcattgaggaagcagcctttatcgcctactgccagcaccgccagcgcgttagcctggcccatcgccgtcatgcgcgtgccttcaatcggatcaacagcaatatctaccgcgtcgccgcgaccagtaccgactttttcaccaatgtagagcatcggtgcttcgtcgatttcaccttcaccaatgacgatggtgccgtcaatgttgacctggttgagcataatacgcatggcgtttaccgccgcgccgtccgcggtgtttttatcgccgcgtcctaaccatttgtagccagccagcgccgcactttcggtgacgcgggaaaattcgatggcaagttctcgtctcatagcaaactctaagcagtaaggaatggcgcgaagtgtagcacaggggaagggagggattattgatgtgtgcggggttgcccccgcacgtttcgggactaccggatgcggcataaacgcttcattcggcatttacattattcgtcgtgttcttcccacgccatcgcgcgtttaaccgcttttttccagcctgcgtaacggtaattacgctcagtggtttcgatgcctggacggaactcgcgctcaatcaccgctttctcttgcagctcgtcgaggttctgccagaagccaaccgccaggcctgcgagataggccgcacccaatgcggtgacttcgcgcacttccgggcgctcaacgcgggtgccgagaatatcggactggaactgcatcaggaaattgtttgctactgcgccaccatccacgcgcagggcgtgcagacggataccagagtcggcctgcatcgcttccagcacgtcacgcgtctgataagcaatagactccagcgtcgcgcgtataatgtggttagcgttcaccccacgagtcagaccgaaaatcgccccgcgcgcatacgggtcccagtacggcgcacccagcccggtaaatgccggaaccacatacacaccattggtgttttgcactttggtggcgaaatattcggaatcgtaggcgtcgttaatcaacttcatttcatcgcgcagccactgaatggatgcgcctgccataaacaccgcaccttccaacgcatagttcacttcgccagtcgggccgcaggcgatggtggtcagcaggccgttttcacttttcaccgctttctcgccagtgttcatcagcataaagcagccagtgccataggtgttcttcgccatcccttctttcacgcacaactgaccaaacagcgcggcctgctggtcaccggcgatcccggagattggaatacgcgtgccgcctttgccgccaatgttagtctgaccgtatacttcggaagaacgacgcacttctggcagcatctcgcgcggaatatccagcacttccagcattttgtcgtcccagtccagggtatggatgttgaacaacatggtacgagaggcgttggtgtaatcggtcacatggacacggccctgagtcattttccagataagccacgtatcaaccgtaccaaacagcaattcaccacgacgtgcacgctcgcgagagccttccacatggtcgaggatccacttcactttggtgccagaaaagtacgggtcaatcaccagaccggtattgctgcggatataatcttctaaaccgtcacgttttaaatgctcgcagatttctgcggtacgacggcactgccagacaatggcgttatagataggcttgccggtttctttttcccagacaatagtggtttcacgctggttcgtaataccgatagctgcaatttgatcggaactgatatcggctttcgccagcacttctaccagcgtggagctttgggtggcccagatttccattgggtcgtgttctacccaacctggttttgggtagatttgctcaaattcgcgctggctcacgctaatgatattggcatcgtgatccattacgaccgcgcgggagctggtggtgccctggtcgagcgcaacgatatattttttttcagtcatgtttaattgtcccgtagtcatattacaggctagctttttgttcactaggagttgtggtttccttttcttccacaacacagatatcgcaaggcaaatggcgaccaatcagtttgcggtaggcaaatgcacctacaatcgcgccaacgatagggccgaaaagcggcaccaggaagtaaggaatgtctctgccgccggtaaaggcgacattgccccagcccgccagccaggcaaagactttcggaccgaagtcacgcgctgggttcatggcaaaacctgtcaatgggcccatagatgcgccaatgaccgcaatcagtagaccaatcagcaagggagccaaagggccgcgtggtacaccgttgccatcgtccgttaacgccaggatcagccccatcagaatagcggtaatcaccatctcaactgcgaaagcctgcacaaaattgatatgaggattagggtaagtagagaaagtgccagccagatcaacactttcaacgctgccgcgaacaatgtgatgagtctgctcgaagtcgaaaaataaattgtagtaaagcccgtaaactaaagccgcagcacagaaagcgccggcaacttgactaacgataaaaggaataactttgcgcttgtcgaaacaggcaaacagccacaatgcaatggtaacagcgggattaagatgcgcgccggaaacccctgcggtcaggtagatggccattgccacccccagtccccaaatgacactgatttcccactgaccaaaagacgcaccagcgacttttagtgctgcaacgcaacccacaccgaagaaaatcaacaacccggtaccgaggaattcagcaatgcactggcctttcaaggtacttgtttgactcataatcggatcctgaagagttaatgtttgttgtatgcgtgaaagtcacggacctccacgatgcttgtaggcatgctgtaaacttatcgttaacgagcaaaaacgagaaatatcgaacttaaaatgtgtgtgcctcgtcataaaatgagcgttatcgcgccatttattccatctgattgtacatgatgcatgtttgttagatcattcgcgcaacaaatttattaacattttcgattgatgtggattatgtcaccaggagaaggatgaaaagtgtggcaaaccgtaatctgcaaggcgtgccgctggacagcgatggcgcggcttcatacaatcggagctaactaaagtgcgctcgtatttattaaggcgtcaccggtaatcgggacgaggatttttatccatcaacgccttgcaattcaggagaggtatgacaatgagtttagaagtgtttgagaaactggaagcaaaagtacagcaggcgattgataccatcactctgttgcagatggaaatcgaagagctgaaagaaaaaaacaacagtctgagccaggaagttcaaaatgcccagcatcagcgcgaagagctggagcgtgagaacaaccatctgaaagaacagcagaacggctggcaggaacgtctgcaggccctgctgggtcgcatggaagaggtctgattacgcttcatcttccgcgtaatttctttactgtgtaggccaacaggtaacgcagaaaaaaggcaccttgcggtgcctttcttatcattcaatatccagcggatcttcactaagaataatcccggtattgtcggcataaagatggtcgccggagaagaaggtgacaccgccaaaattgacgcggacatcgctttcgccaatgccttcgccagcggcaccaaccggaattgccgccatcgcctggatgccgatatccaactcttccaggtcatctacctgacgcaccgcgccgtaaatgaccagaccttcccattcattttgtactgccagacgcgccagttcagcatcgaccagtgcgcgacgaacagaaccaccgccatcgacgacaagaacacgaccacggccattctgttcgagcagatcgtacagcaacccgttgtcctcgaaacattttaccgtgattatttgtccgccaaagctcgcccgtccgccaaagttggagaacagcggttccacgacgttaacatcttcttgatagatgtcacaaagctcggaagtatcgtatttcataggcttaacattcagttgctgcgagaattttcagtatatcgcgctatgtgggctgttggcaaaatcatcaattgttaattgatatttgtcagttatgctgcccactggcttaggaatatccctaaaacaaacagcaggttagtcagtaacgctcccttgacagtacgttccagcattggtcgcatcgccaccgggtccatttcccgcatcacataacgggcttgcttcaccagtaatggtgccgccagcaggaacagccagccccacaggctatgcaggctaaagagattaaacagcgccagacacaccaggctgcccatcagcaggcaggcatgataacgacgcgcgttcacttcacctaagcgcaccaccagcgtgtttttgccattttcgcggtcgctattgatatcacgcaggttattaatattcagtactgccgttgccagcaggccgcatgcggtcgccggaaggatcagtgccggaatcaatgtatgagcctgtaaataccagctccccatgacactcaaccagccaaagaaaaccagtacggaaatatcacccagaccgatataaccataaggacgattgcccacggtgtaggtgatagcggcaatgatgctcaacccgccaagaatcaggaaaccgacaaaatcggccagcgtatggcatgccactgcaaccagtgccagcccggagagacagatgagcacgacggtaataatgagcgcccgtttcatctcttgctgggtaatgacccctttttgcatgccgcgtagcggcccaatgcggtcaggtttatcgctgccttttaccgcatcgccgtaatcattggcgaggttagaaaggatctgtaatagcccggcggtaattagtgccagcagggcgaccagcggatcgaagtgaccttgccaccatgccagcgctgtcccgacgataattgcagcaaaggcgagggggagggttttaggtcgtaaactttccagccacgcctgagttcggctaatttgttgttcagtcataatacgcgccaataaaaatggggcctttcagccccatcaaacaatgatgaaaatgattgaacgcgattataggataaaacggctcagatcttcatctgccaccaacgcatccagatgtttgctcacataatctgcgtcaatagtgatattttgaccgcttaaatcgctggcgtcgtaggaaatctcttccattaaacgctccagaacagtgtgtaaacgacgagcaccgatgttttcggtagattcgttcacctgccatgccgcttccgcgatgcgtttaataccggagtcggtaaactcgatatttacgccttcagtcgccatcagtgctttgtactgcacggtgatagaggcattcggctcggtcagaatacgctcgaagtcgctggtggtcagcgcctgcagttcaacgcggattggcagacgaccttgcagttccgggatcaggtcagacggtttcgcaatctggaacgcgccagaagcgataaacagaatgtggtcagttttgaccatcccgtgtttggtggaaacggtgcaaccttctaccagcggcagcaggtcacgctgaacgccttcacgagaaacatccggaccggaagactcgccgcgcttacagattttgtcgatttcgtcgataaacacgatcccgtgctgctcaacagcgtcgatagcgtcttgcttcagctcttccgggttcaccagtttcgccgcttcttcttcaatcagcagcttcatggcgtctttgattttcagcttacgcgctttttgcttctggccgcccaggttctggaacatggactgcagctggctggtcatctcttccatgcccggaggagccataatttcaacgcccatcggtgctgcggcaagatcgatctcgatttctttgtcatcaagctggccttcacgcagttttttgcggaatgcctgacgagcagcggacggttcctgctgctgttcggtctgtccccagttgtttttagcaggtgggatcagcacgtcgagaatacgttcttctgccagttcttcagcgcgataacggtttttctcgatagcctggacgcgtaccattttcacggcggcatcggtcagatcgcgaataatagaatccacttccttaccgacgtagcccacttcggtgaatttggtcgcttcaactttgatgaacggcgcattcgccagcttagccagacgacgggcgatttcagttttaccgacaccggtcgggccgatcatcaggatatttttcggggtcacttcatggcgcagctcttcgttgagctgcatgcgacgccagcggttacgcagagcaatcgccacagaacgcttggcgttgtcctggccgatgatgtgcttatccagttcgctgacgatttcgcgtggggtcatttcagacatgggagatccttacgctttgtagcttaattcttcgatggtgtggaaatggttggtatagatgcaaatgtcgcctgcaatatccaacgccttttcagcaatttcacgggcgctaagttcagtgttttctaacagcgcgcgcgccgcagcctgggcgtaagggccgccggagccgatagcaataagatcgttttctggctgcaccacgtcaccgttaccggtgatgataaggcttgcagtttcatccgcgactgccagcagtgcttcaagtttgcgcagcatgcgatcggtacgccagtcttttgccagctcaacggcggctttgaccagatggccctgatgcatttccagtttacgttcaaacagttcgaacagcgtaaaagcatccgcagtaccgcccgcaaagcccgcgatgactttgtcgttgtacagacggcggacctttttcacgttgcctttcattacggtattgcccaacgtggcctgaccatcaccagcgatgaccacatggccgttacggcgtacgcttactatagttgtcacgagctgaccccttggttacgaatacagagtacaaaccccgtacaaaagtacggggcataatgcaattatagatgggggggattttgagggtttcaacccccggcggcgagccgaatgcagtttgtatgacccgccatcttcaaccgattgagggtgctgtctgcgttctctttgcctttcaccgggccaatgaccacacgattccagccattgttggtggtgattttgctgtcaaagccttcgaacgccagctgagcacgtaccgtctctgcctgttccgcgcctctgaagctaccgcactgcaccatccagcggcgttcgtcttttttctccgccgtcggttttggcgcgtcagcggcacgagcaactggcgcagcttgctgcggcttgctctgcgcagtcgtgtgcgcaggagtttgcagcagatcctggtacggctgctgagaagaagccggtttagactggcgcggttgcgcctgtaccggtgcggcttggctcgtacgcgtctgctgctgccagctttgttcagtcgtacggctctgctgagccaggcgttgctgttccgctaattgctgcgcctgacgttggcgctgtagcgtttgctgacgctgttccggcgtctgttcattccacggaacttcaaccagctgcgttggctgctggcgcatatcagcctgcatttgttcaagaagctgacgttgttctggtgtcagttgctccggcgttttcacttcaccaccggcagaaggttctgtgggcgcacgcactcccggctggcgactttccagctctttaatgtagcgccagcgttcttctggttttggtggtagtccgtttccggtcactttctggctttgcagcgtctcggactcttctttcttgtgatgcgtaatgaagtacagaccaccgataaaggtcacaagaacggcggcagcaatagcgaccatagcgggagaaaccgcaggcagatttcgttgctttttccgactggtgctcttttttcgccggctaggtgccggttggctgcggcgtacataatctcgttgtgccactatcgtttcgctgtatttattcgttcgtcagcccgccatgttacttaagcggcgggcctttgaccagtcacggcagtcttaaaggtttactttaaggtaacgcgcgtgtacttccccggatgataagttcgcagtccattaaacgagagccactgccaacgtgttgcccctgcatttgatcaagcaataacagcatagcttcccgaccgatttcgtaacgcggctgcgcgatggttgtcagcggcggatcacaaaattgcgtcaggtcgatgttatcaaaaccgattatggaaaggtcttccgggactttcagcccctggcgttttgcctgagaaagtgcgccgagcgccatcacatcgctatggcagaagacagcagtaggcggttgtggaagatcaagcagctgctgcatcgctttgcttccggcttcgaaggtgaagtcgccacgggcgatgtattgcggatcaaccataatgccgcagcgacgcagcgcctgaacatagccttgcaggcggtagtgacacagcggcatctcttcgggaccggctatacagccaatccgtttatgcccttgctcatataaataatttactgcatcaaatgcggcggtcagattgtcgatatgaactgtaggcagctccagctccggtgcaaattcgttcgccatcaccatcggcggcagattacgctgttcctcaatgctggcatcaaacggcagcctactacccagcaacaacatgccatcaatttgcttggtgatgatcaaatcgataaaggttttttcctgctgattttgatgcgcacagtcgccaatcagcaccagatatccgtgatttgccgccgtaacttcgataccgcgaataatttcgctaaagaagggatcgcagatatccgggacaatcaccagaatggtgcgggattcattacgcttgacgttgcgccccataggctgcggtaaataacccacttcccgggccgctttttcaacccgattacgggtggcctgggagactttatcgggattcattaatgctcgggagacggtcgctgtagagacttttgccttgagggcaacgtctttcatggtcgcggcagtttcctgcttcttcgctttcacactcactcctcgcctggcacgtcaggcgtactacatccatgtttacttcacatcggcaacatttttagcagatagcgcgtgaaaacggttacagaattttcatgaaaagtgtgatgaatattgaatttttcgatccgcctcgcatcgtgagcggtttaaccctcaatcggatcaacatccagcacccatttcaccttacgggaatccggtattgtattgatgagcgccagcgtaccgttaatgatgtgttgcaagcgcacgcgggaagggtgctgcaacaatatctgccagcgccagcgaccgccacgtttaggtgccagagccggaaccggaccgagaacccacagtttctcgtctgccagtgggctggagaggatcagattacgcagttgttgcaggaacaatggcgcgtgctgattgttatgatcttccgcacgcacaatcacatggctggtccacggcggtagctgcatcattcgccgctcagccagcgcctgttcggcaaaggcgtcgtagcctttatagagcaacgtttgcaacagaggatgttccggatggtgcgtttgcagcaccacttcgccctgtttacccgcacgcccggcacgaccggcgacctgggtgtaaagctgagcgaaacgctctgcgctgcgaaaatcggcagaaaacagcgcgccgtccacgtccagtaatgcaaccagcgtcacatccgggaaatggtgacctttcgccagcatttgtgtaccaatcaaaatccgcgcgccgccgcgatgtacttctgccagttgctgttccagcgcccctttgcggctggtggtatcgcggtcgatacgagaaatgggcacgccggggaacaacggcgcgagcgtctgttcaagctgttcggtgcccagccccacggggaccaggtgcgtggaaccgcaggaagggcactggcgcggcaccggacgctgactgtcacagtggtggcagcgcagatggtgctgcgcctgatgcagcgtgtagtagtgatcgcaacgtgggcattcggcaatccagccacagtcgtggcacagcagtgcaggcgcaaagccacggcggttaagaaagagaatgacctggttatcagcctgtaaatgctggcgcatacgagtgattaacgccggagccagacctgcctgcaccttctgaccttttaaatccagcacatgttgaattgccggacgcgcattccctgcccgacgggtcaggcgcagcaggcggtattttttctgctggacgttgcataacgtttccagcgcgggcgttgcggagccaagaataatcgggatttgctcgctgtgcgcacgatacaccgccaggtcgcgggcatgatagcgccagccttcctgctgcttgtaggagctgtcgtgctcttcatcaatgacaatcacgccgagatttttaaacggcgtaaacagcgcggagcgggtgccgatcacaatcgccgcctcaccatttttcgctttcagccacgcgctaagacgctcgctgtcgttcaggccggaatgcagaacttccacgggggcattaaaacgttcacgaaaacgggcgatagtttgcggtgtcaggccgatttccggcaccatcaccagcgcctgtttgccctgagcgagcacgttttccagtacgctgagataaacctccgttttaccggaaccggtaacgcccgccagcagccaggcagaaaaagtatctgccgcgctatgaattgcgccaacggcggtggcctgttcggtattcaatcgcaaccgctcaccagaaacggcatagttcgttcgccagtcgctaaactctggtgtttcacttgctaaatcacacagaccttttttgcgtagcgcctgcaacgcggcatcattaaattcgagcgtggcgacctggtcgcgccagattttgccttgccgtaacgccgccagcgcctgttgttgcttgggggagcgtttcaggctgttcagatccaccgcctggccttgttcagtggcaaaccagtaccacatcggcgcgttcgccgcaggccgcccctggcgtagtaaaatcggcaaggcatgaaacagcacatcgccaatcggatgatgatagtaatctgccgcccatagcagcaatcgccagacggagtgagtaaacaccggctcactatccagcacttcgactaccgcttttagctcattgagcggcagttcgctggcatcgctaacacttaccacaatcccgatgcgctcctgctgtttgccaaacggcacgcgcacgcgacacccagctttaaccgtcatgccttctggcagcagatagtcaaaggtacgaggaagcggaacgggcaaggcaacgtgggcaacgggcatagcatcatcctgacttgaaattcggtgggttagtatacacattgccgtagaagagtgcggatcagtttgcatacgctggttaatttctgtatgatttcgcgccttcgtacgaaatgatcgtattgaagctatacttttaacatcgcgtggtgtctggcgttagggctggaagagcgacgcggccttaaaccgaggttttcccatgaaaaaagatattcacccgaaatacgaagaaattactgctagctgctcttgcggtaacgtaatgaaaatccgctccaccgttggtcatgacctgaacctcgacgtgtgcagcaagtgccacccgttcttcactggcaaacagcgtgatgttgctaccggtggccgtgttgaccgcttcaacaagcgtttcaacatcccgggcagcaaataagaccggatttccgaaaaaagcgccgcacggcgctttttttgtgcctgaattttggtcgtattaccagctaaacagcggccattctttggcgaccgtggtgagttgtggcgcatcgaaaacggcttgtgggctgaccaccgtttcctcaagcggaatattcttgccgtaacgttctttgagctttgcctgaacttgtgggctgctcaggtcgaactctttcaacttctgctgctcgcccacgcgcattcccagcgcgttctggtaaaccttccacaccacttcgctacagtactggcgatcgtcgctccaactgaagctgaaatcatacggtttaccgagataacgttttgccgtttgcgccagtttttgctgttgttcaacactcagtccgccttcaacgcggcgaacaacgtatttgcccttttcaccatgggcgatccactgcttgagcggggtgtatttcaccgggccgactgcttcaaaaacgtagggctttttgttgcgtatcaccagcataccggtgtggctataatcggtatgggtcgccagttggatcgctttactttggctactgcgagagatctgaaagatgatgtcgccggtttgtggctgccaggcaaaggcaggtacagaaaccagcaggctgaggatcagcagcctgtttttcatagttaaacgtccatgtataaaaagcggtgggtcgcagacaacgtgctcgttgtttatgccggatgcggcgtgaacgccttatccggcctacaagttcgtgcaaattcaataaattgcaatatgacgtaggcctgataagcgtagcgcatcaggcgattccactccgcgccgctcttttttgctttagtattcccacgtctccgggttaatccccatctcacgcatgatctcttttgccgcttccgggatttcgtcgctgcgctctttacgcagatcggcatcatccggcaaaggttgcccggtaaaggcatgcagaaacgcttcgcacagcagctcgctgttggtagcgtgacgcaggttgttcacctgacgacgcgtgcgttcatcggtgaggatttttaacaccttaagaggaatggaaaccgtaatctttttgacttgttcactcttcttgccgtgctcagcgtatgggctgatatattcgccgctccattcagccatgagatacttaatcctcttcgtcaataaattgagaccagaccacacagttgatgtgggtactgaccgtaaacccgcatagtttaccgtacaggcgttaccgtgacatcgtgtaatgcacctgtcggcgtgataatgcatataattttaacggctatttgggatttgctcaatctatacgcaaagaagtttagatgtccagatgtattgacgtccattaacacaatgtttactctggtgcctgacatttcaccgacaaagcccagggaacttcatcacatgacgcgtaaacaggccaccatcgcagtgcgtagcgggttaaatgacgacgaacagtatggttgcgttgtcccaccgatccatctttccagcacctataactttaccggatttaatgaaccgcgcgcgcatgattacagccgtcgcggcaacccaacgcgcgatgtggttcagcgtgcgctggcagaactggaaggtggtgctggtgcagtacttactaataccggcatgtccgcgattcacctggtaacgaccgtctttttgaaacctggcgatctgctggttgcgccgcacgactgctacggcggtagctatcgcctgttcgacagtctggcgaaacgcggttgctatcgcgtgttgtttgttgatcaaggcgatgaacaggcattacgggcagcgctggcagaaaaacccaaactggtactggtagaaagcccaagtaatccattgttacgcgtcgtggatattgcgaaaatctgccatctggcaagggaagtcggggcggtgagcgtggtggataacaccttcttaagcccggcattacaaaatccgctggcattaggtgccgatctggtgttgcatagttgcacgaaatatctgaacggtcacagtgacgtagtggccggcgtggtgattgctaaagacccggacgttgtcactgaactggcctggtgggcaaacaatattggcgtgacgggcggcgcgtttgacagctatctgctgctacgtgggttgcgaacgctggtgccgcgtatggagctggcgcagcgcaacgcgcaggcgattgtgaaatacctgcaaacccagccgttggtgaaaaaactgtatcacccgagcttgccggaaaatcaggggcatgaaattgccgcgcgccagcaaaaaggctttggcgcaatgttgagttttgaactggatggcgatgagcagacgctgcgtcgtttcctgggcgggctgagcttgtttacgctggcggaaagtttagggggagtggaaagtttaatctctcacgccgcaaccatgacacatgcaggcatggcaccagaagcgcgtgctgccgccgggatctccgagacgctgctgcgtatctccaccggtattgaagatggcgaagatttaattgccgacctggaaaatggcttccgggctgcaaacaaggggtaaaaatgagtgtgattgcgcaggcaggggcgaaaggtcgtcagctgcataaatttggtggcagtagtctggctgatgtgaagtgttatttgcgtgtcgcgggcattatggcggagtactctcagcctgacgatatgatggtggtttccgccgccggtagcaccactaaccagttgattaactggttgaaactaagccagaccgatcgtctctctgcgcatcaggttcaacaaacgctgcgtcgctatcagtgcgatctgattagcggtctgctacccgctgaagaagccgatagcctcattagcgcttttgtcagcgaccttgagcgcctggcggcgctgctcgacagcggtattaacgacgcagtgtatgcggaagtggtgggccacggggaagtatggagcgcacgtctgatgtctgcggtacttaatcaacaagggctgccagcggcctggcttgatgcccgcgagtttttacgcgctgaacgcgccgcacaaccgcaggttgatgaagggctttcttacccgttgctgcaacagctgctggtgcaacatccgggcaaacgtctggtggtgaccggatttatcagccgcaacaacgccggtgaaacggtgctgctggggcgtaacggttccgactattccgcgacacaaatcggtgcgctggcgggtgtttctcgcgtaaccatctggagcgacgtcgccggggtatacagtgccgacccgcgtaaagtgaaagatgcctgcctgctgccgttgctgcgtctggatgaggccagcgaactggcgcgcctggcggctcccgttcttcacgcccgtactttacagccggtttctggcagcgaaatcgacctgcaactgcgctgtagctacacgccggatcaaggttccacgcgcattgaacgcgtgctggcctccggtactggtgcgcgtattgtcaccagccacgatgatgtctgtttgattgagtttcaggtgcccgccagtcaggatttcaaactggcgcataaagagatcgaccaaatcctgaaacgcgcgcaggtacgcccgctggcggttggcgtacataacgatcgccagttgctgcaattttgctacaccagtgaagtggccgacagtgcgctgaaaatcctcgacgaagcgggattacctggcgaactgcgcctgcgtcaggggctggcgctggtggcgatggtcggtgcaggcgtcacccgtaacccgctgcattgccaccgcttctggcagcaactgaaaggccagccggtcgaatttacctggcagtccgatgacggcatcagcctggtggcagtactgcgcaccggcccgaccgaaagcctgattcaggggctgcatcagtccgtcttccgcgcagaaaaacgcatcggcctggtattgttcggtaagggcaatatcggttcccgttggctggaactgttcgcccgtgagcagagcacgcttagcgcacgtaccggctttgagtttgtgctggcaggtgtggtggacagccgccgcagcctgttgagctatgacgggctggacgccagccgcgcgttagccttcttcaacgatgaagcggttgagcaggatgaagagagcttgttcctgtggatgcgcgcccatccgtatgatgatttagtggtgctggacgttaccgccagccagcagcttgctgatcagtatcttgatttcgccagccacggtttccacgttatcagcgccaacaaactggcgggagccagcgacagcaataaatatcgccagatccacgacgccttcgaaaaaaccgggcgtcactggctgtacaatgccaccgtcggtgcgggcttgccgatcaaccacaccgtgcgcgatctgatcgacagcggcgatactattttgagcatcagcgggatcttctccggcacgctctcctggctgttcctgcaattcgacggtagcgtgccgtttaccgagctggtggatcaggcgtggcagcagggcttaaccgaacctgacccgcgtgacgatctctctggcaaagacgtgatgcgcaagctggtgattctggcgcgtgaagcaggttacaacatcgaaccggatcaggtacgtgtggaaagcctggtgcctgctcattgcgaaggcggcagcatcgaccatttctttgaaaatggcgatgaactgaacgagcagatggtgcaacggctggaagcggcccgcgaaatggggctggtgctgcgctacgtggcgcgtttcgatgccaacggtaaagcgcgtgtaggcgtggaagcggtgcgtgaagatcatccgttggcaagtctgctgccgtgcgataacgtctttgccatcgaaagccgctggtatcgcgataaccctctggtgatccgcggacctggcgctgggcgcgacgtcaccgccggggcgattcagagcgatatcaaccggctggcacagttgttgtaatttcagaaatttaataatgcccggtactcatgttttcgggtttatggtttctaatgaaatatattgaattatcataggattaggccggattaagcgtttacgacgaatccggcaagaagcaataagtacatggttagtttatatttgcagtccggtttgctttgcataccggattttctttttcttaccatcctgaagttttttcatcttccctgatttttcctcaccatcattggtcatttttcggttgacgcccttcggcttttccttcatctttacatctggacgtctaaacggatagatgtgcacaacacaacatataactacaagcgattgatgaggtaaggtatgagcttttttcacgccagccagcgggatgccctgaatcagagcctggcagaagtccaggggcagattaacgttagcttcgagtttttcccgccgcgtaccagtgaaatggagcagaccctgtggaactccatcgatcgccttagcagcctgaaaccgaagtttgtaagcgtgacctatggcgcgaactccggcgagcgcgaccgtacgcacagcattattaaaggcattaaagatcgcactggtctggaagcggcaccgcatcttacttgcattgatgcgacgcccgacgagctgcgcaccattgcacgcgactactggaataacggtattcgtcatatcgtggcgctgcgtggcgatctgccgccgggaagtggtaagccagaaatgtatgcttctgacctggtgacgctgttaaaagaagtggcagatttcgatatctccgtggcggcgtatccggaagttcacccggaagcaaaaagcgctcaggcggatttgcttaatctgaaacgcaaagtggatgccggagccaaccgcgcgattactcagttcttcttcgatgtcgaaagctacctgcgttttcgtgaccgctgtgtaagcgcgggcattgatgtggaaattattccgggaattttgccggtatctaactttaaacaggcgaagaaatttgccgatatgaccaacgtgcgtattccggcgtggatggcgcaaatgttcgacggtctggatgatgatgccgaaacccgcaaactggttggcgcgaatattgccatggatatggtgaagattttaagccgtgaaggagtgaaagatttccacttctatacgcttaaccgtgctgaaatgagttacgcgatttgccatacgctgggggttcgacctggtttataaatagtgtggcttttgtgaaaatcacacagtgatcacaaattttaaacagagcacaaaatgctgcctcgaaatgagggcgggaaaataaggttatcagccttgttttctccctcattacttgaaggatatgaagctaaaacccttttttataaagcatttgtccgaattcggacataatcaaaaaagcttaattaagatcaatttgatctacatctctttaaccaacaatatgtaagatctcaactatcgcatccgtggattaattcaattataacttctctctaacgctgtgtatcgtaacggtaacactgtagaggggagcacattgatgagcacgagtgacgatatccataacaccacagccactggcaaatgcccgttccatcagggcggtcacgaccagagtgcgggggcgggcacaaccactcgcgactggtggccaaatcaacttcgtgttgacctgttaaaccaacattctaatcgttctaacccactgggtgaggactttgactaccgcaaagaattcagcaaattagattactacggcctgaaaaaagatctgaaagccctgttgacagaatctcaaccgtggtggccagccgactggggcagttacgccggtctgtttattcgtatggcctggcacggcgcggggacttaccgtagtatcgatggacgcggtggcgcgggtcgtggtcagcaacgttttgcaccgctgaactcctggccggataacgtaagcctcgataaagcgcgtcgcctgttgtggccaatcaaacagaaatatggtcagaaaatctcctgggccgacctgtttatcctcgcgggtaacgtggcgctagaaaactccggcttccgtaccttcggttttggtgccggtcgtgaagacgtctgggaaccggatctggatgttaactggggtgatgaaaaagcctggctgactcaccgtcatccggaagcgctggcgaaagcaccgctgggtgcaaccgagatgggtctgatttacgttaacccggaaggcccggatcacagcggcgaaccgctttctgcggcagcagctatccgcgcgaccttcggcaacatgggcatgaacgacgaagaaaccgtggcgctgattgcgggtggtcatacgctgggtaaaacccacggtgccggtccgacaagtaatgtaggtcctgatccagaagctgcaccgattgaagaacaaggtttaggttgggcgagcacttacggcagcggcgttggcgcagatgccattacctctggtctggaagtagtctggacccagacgccgacccagtggagcaactatttcttcgagaacctgttcaagtatgagtgggtacagacccgcagcccggctggcgcaatccagttcgaagcggtagacgcaccggaaattatcccggatccgtttgatccgagcaagaaacgtaaaccgacaatgctggtgaccgacctgacgctgcgttttgatcctgagttcgagaagatctctcgtcgtttcctcaacgatccgcaggcgttcaacgaagcctttgcccgtgcctggttcaaactgacgcacagggatatggggccgaaatctcgctacatcgggccggaagtgccgaaagaagatctgatctggcaagatccgctgccgcagccgatctacaacccgaccgagcaggacattatcgatctgaaattcgcgattgcggattctggtctgtctgttagtgagctggtaagcgtggcctgggcatctgcttctaccttccgtggtggcgacaaacgcggtggtgccaacggtgcgcgtctggcattaatgccgcagcgcgactgggatgtgaacgccgcagccgttcgtgctctgcctgttctggagaaaatccagaaagagtctggtaaagccagcctggcggatatcatagtgctggctggtgtggttggtgttgagaaagccgcaagcgccgcaggtttgagcattcatgtaccgtttgcgccgggtcgcgttgatgcgcgtcaggatcagactgacattgagatgtttgagctgctggagccaattgctgacggtttccgtaactatcgcgctcgtctggacgtttccaccaccgagagtctgctgatcgacaaagcacagcaactgacgctgaccgcgccggaaatgactgcgctggtgggcggcatgcgtgtactgggtgccaacttcgatggcagcaaaaacggcgtcttcactgaccgcgttggcgtattgagcaatgacttcttcgtgaacttgctggatatgcgttacgagtggaaagcgaccgacgaaagcaaagagctgttcgaaggccgtgaccgtgaaaccggcgaagtgaaatttacggccagccgtgcggatctggtgtttggttctaactccgtcctgcgtgcggtggcggaagtttacgccagtagcgatgcccacgagaagtttgttaaagacttcgtggcggcatgggtgaaagtgatgaacctcgaccgtttcgacctgctgtaatctgaccccgttcagcggctgcttgctggcagtcgctgaacgttctttaccagcgtatagtgggcgaacgaaaactacacactggatctctcatgtctgccgcaggaaagagcaacccactggcaatcagtggcctggttgtgctcacacttatctggagttatagctggattttcatgaagcaagtcaccagttacatcggtgccttcgactttaccgccttacgctgcattttcggcgctctcgttttattcatcgtccttttattacgtggtcgcggaatgcgcccgacaccgtttaaatacaccttagccattgccctgttacaaacctgcgggatggttggtctggcgcagtgggcgttggtcagcggaggtgcggggaaggtggcgatcctgagctataccatgccgttctgggtggtgattttcgccgcgttgtttctcggtgaacgcctgcgacgtgggcaatatttcgcgattctgattgccgctttcggcttatttttggtgttgcagccgtggcaactcgatttctctagcatgaaaagtgccatgctggcaatcctctccggcgtcagttggggggcgagcgcgattgttgctaaacgtctgtatgcccgtcatccgcgcgtggatttattgagcttaacatcctggcagatgctgtatgcggcgctggtgatgagtgtggtcgctttactggtgccgcaacgtgaaattgactggcagcccaccgtgttctgggcgctggcctacagtgcgattctggcgacggcactggcgtggagcttatggttgtttgtattgaaaaacttgcctgccagtattgccagcttaagcacactggccgttcccgtttgcggcgtactcttttcctggtggctgctcggcgagaatccgggggccgttgaaggtagcggtattgtgctgattgtgctggcactggcgctggtgagccgtaagaaaaaagaagccgtcagtgtaaaaaggatctgaattttttcttcatgtggggcgatctcttatttaacaaaataacgataatgccccaccatccgccagttaaacagcacatcttcttcctgcgcgcctgcgccaatgttatgtatcaccagcggcgtaccgtcgcgggcgaagccatcactaaccaccccaatatgtgccagcccgttatccagtcgccaggagacaatatcgcccgcttgatagtcactggggttcttgctggtggggcgtgttttatcatggcggctaaaccaggtttccagattaggcacccgacggtgatcgatgttgctgtccgggcgctttaacttccatttttgcgggtactcagcaaaattcttcgccatatcttcgtgaaccagtttctgcaaatcgaccttctggctgcgcaatgcgcggatcaccacatcggaacatacaccgcgttcttgcggaacatcaccgccaggataagtaagctgcacatacgccggatcgtaaaatagcgtgctgccaatttgctgtctggcaccgtctgcgatggcaaggttggtattggcctggatttgtaccacggttggtggaacggcgggagattttaaggagtggctggtaaatgccgttagcaggctgagcagcgccagactagctttcatctggttcgtccgtgaaaataagagtcacagattcgaccttccgggctaacgattgttctgtagagaaaatgtccagaagcggataaaaaattcctgaacaacgtgggagtttcagattactggcacagagtgccggatgcggagtgaacgccttatccggcctacaaaagcacgcaaattcaatatattgcagagattgcgtaggcctgataagcgtagcgcatcaggcaattttgcgttcaaactcccggacaagccgggagtttggagtaggttattcccactcttgcaggaaacgctgaccgtactggtcggctaccagcagagcggcgtaaacctgatctggcgtcgcgccgccaggcatgttgtgaatggtttcaccttctgcacatgccgcttctgccacaattcgcattttcgccgggacatcttctttaatatccagttgagcgagagttattggcaaacctaccgcatggctaagggcagctacggtttcgatttcctccaccggcgcattttccagaaccagctgcgtcagcgtaccgaatgccactttttcaccgtgataatagtgatgcgcgtccgggatagcggtcaggccgttatgcactgcgtgcgccgcagccagaccaccactttcaaaaccaacaccgctcaaataggtgttcgcttcaatcacgcgctccagcgccggagtcactacatgctgttcggcagcaagcatcgctttttcgccttcttccagcagggtgttgtagcacagttcagccagtgccagcgcagcctgggtgcacttgccgcccgccatggtggtcgcgccgctacgagagcaggcacgcgcttcaaaccaggttgccagcgcatcgccgatacccgccgctaacagacgtgcaggtgcgccagcgacgattttggtgtcgacaatgaccatattcgggttatttggcaacagcagatagcggtcaaactcaccctcatcggtgtagataacagacaatgcgctgcacggtgcatcggtagaggcgatagtcggtgcgatcgctaccggaacacccatgaaatgtgccagtgctttggcagtatcgagggtttttccgccaccgataccgagaattgcgccacactgcgcagtctccgcgatgccacgcagacggtcgatctcattttggctacattcaccgccaaacggcgcaatttctactaccagtccagcatctttaaagcttttctcgacagtggattgagcaaaacctaaaacaaatttgtcacccaccactaaccagcgttctgccagcggcttcaggtattcgcccagacgattaatcacatcagcgccctggatgtatttacccggactttgaataatgcggtccataattgctcctttagagatgagtagtgccaaatgcggcattccagtcgtgttcgaacttctctatagcactctctaccgcaggggtgttgagcatttgttgcgctacatctaagggcagggtgatggattcacatcctgccagtaaacagtccagcgcctgacgcggcgttttaaagctggctgccagcaccatgctttctggcgcgtgcatttctaacagcgtttgcagctcctgaaccgtacgaatgccgtctccgccctgggcatctacgcggttaacatacggagcaacgtattttgcccctgccagtgcggctaataacccttgtgcggcgctatatacagcagtgccaagtgtagtaataccctcttttttcagtattttaattgctgccagaccttcggaagtcaccgggattttcaccacaatacccggaatagcgtcgcgcaggcgcttcgcttcttccaccatcccctgcgcgtcgcggctcatggtctgagcaaacagaatgccctcatcaccaatcgctttttgcagacgcggcagcacttcccatatggactccttgctggcagcgataatgctcgggttagttgtcaccccggcaatggggaatatgcgtgccagacgttcgacttctgcgacgttagcggtgtccagatacagttccatgatgtttccttttacagttccagttcatgttgcagcaggctggcgatagcgtcggcagaggcggcgttaaccagcgcgttacggaattcttcgtgcatgatgcggcgagcgaggcggctgaaaatgcgcatatgctgatcgcccgcagcgtgtttgttcagggttaacataatgatgaattgcgcttcatcatcgccccagcgcaccggcgcttgcagacgcgccacgctgatggtggattgctcaatgtgttcacttttgctgtgtggaatggcaaaactaaagcccagaccggtagagaaaacggcctcgcgcgcccacaagtcggcttccagtttacgcggatagcggcagcggcccgccagcagcaggttatcggtcatgcctttgagcacttcttctttgctgcgccagtcgctttccagtgtgatgcactcggcggtgaccagcggtgcgtcttgttgggtcatgcggaattgcgccagcaggtgttctacttccaggctagtacggcaggccattgcctggttgagcaacttgcggcactcacggctatcaagttgcgccatccgagctttcgccgccggaatacttggtgcgctcatgctgagttcatccagccctaagccgaccagcaacggcagcacggaacctttcgctcccagctcaccgcacagaccaatccatttgccctggcgatgcaccgcttgcacggcgtaatcgagcgcccgcaagaatgccggattcaggctgttgtagtgacgagtaaccttagcgttatcgcgatccaccgccagcagatactgcgtcaggtcattactaccaatactaaagaaatcaatctcttcgcagcattgatcgatgatgaacatcacgctcggcacttccagcatgatgccgagctggattttctcatcaaacggaatgtgttcgttacgtagttgctgtttggcttccgccagtttttctttcacccataagatctcttccatactggagatcatcgggatcatgattttcaggctgccgtgagcggaggcgcggaggatgctccgtagctgcgtggtaaacaagctcgcgtactcttcataaatacgcacggcgcgataaccgaggaacgggtttgcctctgcgggaatgttcagataatcaacgggtttgtcgccgccaatgtccatagtgcgcacaataatgctgcgtccgttggcggattccagcgcctgacaaaaaatgttgtacaactcgctttcgcccggtgcgctggtgcgatccatatagagcatttcagtgcggaacaaaccaacgccttccgcaccattgccgaatgcggcctgcgcttccacggagtgagcgatgttagcggcaatttcaatgcggataccgtcagcggtacgggcttgttgggtcagccagacacgctgttgctcacgcagggcgtcctgtacgcgggcttcttgctgataataacgagctacggcttcccctggctcaaccacaatcgccccggcgttgccgtcgatataaatcgtttgttgctgccacggagtaagggcatcaatatccacaccaaccagcgttggaatgttgaagctacgggcaaggatcaccgtatgactggtggtgccgccgcttttgagcaacaatcctttgaggtgatttttatccagttcgaggaactggctgggggtcagttcatcagccatacaaatggcgggctgcgtcagtttgcccggtgccgggaagcgttgctcaccgtagatttgctggagtaactggaagcagacgtcgcgtacgtccagggcacgttcttgcaggtagctgctgctggaacgggaaaactcttcgcaaaagtgattcgcgctggcaacaattgcttcggcgcagcttaatccggcgctgacgcctgccagtaaatgttcgcgcagggaagtatcgccagccagggatcggtgagcttccagaatcgcgctggtagcaccgtcgctatccagcagacgaaactcaatgtttttcagtaccagcgtcaggccgttttccagtgcggattgctcggcgtcaacgcctttggctgcgggaagattacccagcgcattgagatctaaagaagagatcggcgtcagaatgccgcctgcactaccgctgcacacggtgcgggcgcggataatttgcggattcagattggtcagactaaccggcagtggttccagttcgtcagatttaacttccgccagcggcgcatcgcagtgggggaattcatcgcgcagccattggcttaaacgctggtgcgcttcctgttcgtcggccccggaaatcagtaactggcagttatcgcccgccagcgtatcggtgccaatcagcgcaagggcgcttttggcgttgcccttgcggtcagtgcgcaggttatgccactcaatttgactactaaaagtattacacagcgtttcaacgtggcttgccggacgcgcatgtacgccgttaggtagctcacaaataaattccacaatcagggccattgcctctctcccggtacggttttctgtttacaggataagagcgcacggcaacggcctgccatgtgacaaatctgccaaaagctggacaaatgtaatgtaaccgtcaatttgcgacgcgtctcacaagacgctgttttgcggcatgcttccggtttatcgcaagttatgaggcggatcgcatttttgtactgatattacaaaagtccagtaaatggcctttttatccactgtttgctccgcctgcgattgcctattgtttcctccatcaaaaatatggacatgggctttcgcaagcccgggagcagcttatgaatgagttggtgcagatcctgaaaaatacccgtcagcatttaatgacgggcgttagtcacatgattcccttcgtggtaagcggcggtattttgctggcggtttccgtcatgttgtatggcaaaggcgcagtgccggatgccgtagccgatccaaatctgaaaaaactgtttgatatcggcgttgcgggcttgacgctgatggtgcctttcctcgcagcgtacatcggttattccattgcagagcgttctgcgctggctccgtgcgctatcggtgcctgggttggtaacagctttggtgcgggcttctttggtgcactgatcgccgggattatcggcggcatcgtggtgcattacctgaagaaaattccggtgcataaagttctgcgcagcgtgatgcctatcttcattattcctatcgtcggcacactgattaccgcaggcatcatgatgtggggcttgggcgagcctgtaggggcgttgaccaacagcctgactcagtggcttcaggggatgcagcagggcagcattgttatgctggcggtgatcatgggtctgatgctggcgttcgatatgggcggtccggttaacaaagtggcctatgccttcatgctgatttgcgttgctcagggtgtttataccgtggtggccatcgctgccgtgggtatttgtatcccgccgctggggatggggctggcgacgctgattggtcgtaaaaatttctccgcagaagagcgcgaaaccggcaaagcggcactggtgatgggctgtgttggcgttactgaaggggcgattcctttcgccgctgccgatccgctgcgtgtcattccttccatcatggtcggtagtgtttgtggtgcagtaactgcggcgctggtcggtgcgcagtgctatgcaggctggggtggtctgattgtgctgccggtggttgaaggcaagctgggttatatcgcagcagtggctgtcggagcagtggtgacggctgtttgtgtgaacgtgctgaaaagtctggcgcgtaaaaatgggtctagcactgatgaaaaagaagacgacctggatttggattttgaaattaattaattgaggaacgagccatgacgaaaattattgcagtaaccgcatgtcctagtggtgttgcccatacctatatggcagcagaggcgctggaaagtgccgcgaaagcgaaaggctgggaagtgaaagtagaaacccaggggagtattggtctggaaaatgaactgactgcggaagatgtggcgagcgctgatatggtgattctgaccaaagatatcggcatcaagtttgaagagcgttttgctggcaagaccatcgtgcgcgtcaacatcagcgatgcagtaaaacgtgctgacgccattatgagcaaaattgaagctcacctggcgcaaaccgcttaagttcttctcccgctcgcaagggcgggttcgctttcccacaggagttcctcatgacgaatcgtatctctcgcctcaaaactgcactgtttgccaatacccgtgaaatcagcctggagcgggcgctgctttataccgccagccatcggcaaaccgaaggcgaaccggtgatattgcgccgggcgaaagcaacagcgtatatccttgaacatgttgaaattagcattcgtgatgaagaactgattgccggtaaccgcaccgtaaaaccgcgcgccgggattatgagcccggaaatggacccttactggctgctgaaagagctggatcaattcccgacgcgtccgcaggaccgctttgctatcagcgaagaagataaacgtatctaccgtgaagagttgttcccgtactgggaaaaacgtagcatgaaagatttcatcaacgggcagatgacagatgaagtaaaagccgcgaccaacacgcagattttcagcatcaaccagacggataaaggccaggggcacattattattgattacccacgcctgttgaatcacgggctgggtgagctggtggcacagatgcagcaacattgtcagcaacagccggagaatcacttttatcaggccgcgttgttactgctggaagccagccagaaacacattttgcgttacgccgaactggcggaaacgatggcggcaaactgcacagatgcccagcgtcgcgaagagctgctgactattgcagagatctcccgccataacgcgcaacataagccgcagacgttctggcaggcgtgccagttattctggtacatgaacatcattctgcaatacgaatccaacgccagtagcctaagcttggggcgcttcgaccagtatatgttgccgttctatcagacaagtttaacccagggcgaagatgcggcgttcctgaaagaactgctcgaatctttatgggtgaaatgcaacgacatcgtgctgttgcgctccaccagtagcgcgcgttatttcgccggtttcccgaccggctataccgcactgctcggcgggttaaccgagaacggacgtagcgcggtgaacgtgcttagcttcctttgccttgacgcctatcaaagcgtgcaattaccgcaaccgaacctcggcgtgcgcactaacgccttgatcgacacgccgttcctgatgaaaaccgccgaaaccattcgcttcggtaccggtattccgcaaatctttaacgatgaagtggtggtgccagcgttcctcaaccgtggcgttagcctggaagatgcgcgcgactattccgtagtgggctgtgtggaattatctattcccggcagaacctacggcttgcatgacatcgcgatgtttaatctgctgaaagtgatggaaatctgcctgcatgaaaatgaaggcaatgctgcgctgacttatgaaggtttactggagcagatccgcgccaagatcagccactacatcaccctgatggttgagggcagcaatatttgtgatatcggccatcgcgactgggcacctgtaccgctgctcagtagctttatcagcgattgtctggaaaaaggccgcgatattaccgatggcggcgcgcgttataacttctccggcgtacaggggatcggtatcgccaacctgagcgattctctccatgcgttgaaagggatggtttttgagcaacagcgtttaagttttgacgaattgctgagcgtattaaaagccaacttcgcaacgccagaaggcgaaaaagtccgcgctcgcttaattaaccgcttcgagaaatacggtaacgatatcgacgaggtggataacatcagcgccgaactgttgcgccactactgcaaagaagtggaaaaataccagaacccgcgcggcggctacttcacgccgggaagctataccgtttctgctcacgtcccgttgggaagcgtggttggcgcgacgccagacggtcgttttgccggagaacagctggcagacggcggcttgagtcccatgctgggccaggacgcacaagggccaacagcggtactgaagagtgtcagtaagctcgataacacgctgctgtctaacggtacgttgctgaacgtgaaattcactccggcgaccctggaaggtgaagcaggattacgcaaactggccgacttcttacgggcgtttacccagcttaagttacaacatattcagtttaacgtggtgaacgccgacacgttgcgggaagcgcaacagcgcccacaagattatgccgggctggtggtgcgcgttgccggatacagcgccttctttgtcgaactgagcaaggagatccaggatgacatcatccgccggacagcgcatcagctgtaattaaactgtcgaaggagatccaggatgacaagttccgccggacagcgcatcagctgtaacgttgtggaaacgcgccgcgatgatgtggcgcgcattttcaacattcagcgttatagtctgaatgacggcgagggcattcgtacggtggtcttttttaaaggctgtccgcatctttgcccgtggtgtgctaatccggagagcatctccggcaaaatccagacggtacgcagagaggcgaaatgtctgcactgtgcgaaatgtttgcgtgatgcggatgaatgcccctccggggcgtttgaacggattggtcgcgatatcagccttgacgctctggaacgggaagtgatgaaagatgacattttctttcgcacgtccggcggcggcgtcacgctttctggcggcgaagtgttaatgcaggcggagtttgctacccgttttttacagcgactgcggctgtggggtgtgagttgcgccattgaaactgccggagacgcaccagccagcaagctattaccgctggcgaaattgtgcgatgaagtgttgttcgatttaaaaattatggacgcgactcaggcgcgggatgtggtgaagatgaacctgccacgcgtgctggagaatctgcgtttgctggtgagtgagggcgtcaacgtgatcccgcgtttaccgctgatccctggtttcacgctcagccgggagaatatgcagcaggcgctggatgtactgatcccgctgaatatcaggcagatccatctgttaccgtttcatcagtacggcgaaccgaaataccgcctgctggggaaaacatggagcatgaaagaggtgcctgcgccgagcagtgctgatgtggcaacgatgcgcgaaatggcagaacgggccggacttcaggttaccgtgggaggttaaaatggcatacctggtggcagtaaccgcctgcgtaagcggcgtggcgcatacttatatggcggcggaacggctggaaaagttgtgcctgttagagaagtggggagtcagcattgaaactcagggcgcgctgggaacggagaatcgtttagcggatgaggatatccgccgggcggatgttgctctgttgattacggatatcgagcttgccggtgccgagcgatttgaacattgccgctatgtgcaatgcagcatctacgcattcctgcgtgagccgcagcgggtaatgagcgcggtgcgcaaagtgctttctgcgccgcagcaaacccatcttattctggagtaattattctggagtagtcggtttttctgtcagttggctgtggtactgccggcgatattcgctcgggctgcgttcggtgtttttacgaaacagacggcagaagtagttgctgtcgacaaagccgcaggcgtgcgccacttcttttaccttcaggtcatagcctttcaataacgtcttagcgtgctccagtcgcgtgtgattcaggtattcgttaaaaccaatggcccccgttttttgaaacaggtggctgaggtaatttgggctaatataaaacgcctgtgcaacagattcgcgggtaagcgcggaggcatagcgttcgtcgatataatcgcgaatagcttcaaatagtgcctggctgcgactggcggtctggatttggctgccaagcaaatcgcggcagtggctaagcaggctggcgacgataagccttgccgtttgctgctcctgcggctgcatttgcatttcattgagcgtttgtagcagaaaagaacctatgcgtgggccgcgtcgggcgacgtgttgcttcgccagattttgatattgtttgccatcccattgcacgacgctgaagccgagttgctgtttgccaaacagcacgctaaaggtagtagcgggggcttgccattgtggaaaattccagccaccagcaggaacgtacagcacatcgccgggaactaacgttgctccagcgccggtatcaacaaactcaccttccagcacaatttccagccgtggaaaatcgacctgatacgcaagatcgggcaccgggccgttactgctggcaaagtaaatctggcgcagggacagcgggccgttgatcaggcgggagagcagatagctgacgtcgtgatacatgttattcccttaggtatgtagacgggaaaacagtaactggcattattaaaaaaggccacctgaaaagtgtggcctgaggggagttcgatgtaaacattgcggcagttgtattgccggatgtggcgtaaacgccttatccagcctaccgccgcgatctgtaggccggataagacgcgtcaagcgtcgcatccggcaaatagcgcctggctgataattactgattacccacctgatcgccatagggcagtgtgtcgtaatcgatcagtgcgtttttcttatacgggttaccaatccagcgggtagtttctttgaactgcggattcaccacactacgggttggatcgtaaccgtcgtaagataagcccgccaaatcactccaggtgtggatcagttccgccaggctgtatttacgatcaacatcctggctgaaatcacggggatgagtcgcttgccatttttcactcgtccacagcaggaacggaatggtgtacatatgacgcgtcgggttgtcctcattacgcccctgagttttgtgcggcggcgtgtcgtaaacctcttcaccgtggtcagagaaataaaccaggaaaccgttcgggtttgctgctttaaagtctttaatcaggctggcaaccacatgatcgttatacaggttagcgttgtcataatcgttataactctccagctcttccgcgtttaatcccggcggaacatgatcggtattgccatcaaacttgccctgattttccgggtagcggtatttgtatttgatatgcgtacccagcagatgaacaatgatcagtttcttcggcgcagggtcattcagcacttcctggaacggcttcagcacgttggtgtcgtattcacgcgcactctgcgtacgttgctggttcatgtagtactgcttgtcggtctggcggctaaataccgtcagcatggtattgcgggcggtcatcgtctgctggttggtgatccagaaggttttataacccgcctgtttcatcatgttcatcaggctcggctgcgtcagatacagatccgggttcttttcattggcaaaggtcagcgcctgttgcaggatttcaatggtgtacggacgagacgtaactacgttattaaacacggtcagattcggatcggttttatgcagcgcatccagctccggcgtggtttcacgcggataaccgtacagactcatgcgtccgcgctgggtgctctcgccaatcaccagcactaaagtgcgcggttcgttaccgctttcatctttgaaattagccagtggcggcaaggcattattttcattcagtaactttgttaggctgtttagttgctgacgatactgataatagccggtcaggaattgccacggtgcggcaggctccatacggctggccaggttatccaacgttttctcaaacggcttgtttttgataaacgtattcatggcgatcggatgcagaatcaagccataaagcagggcaaaagagacaacataacgccacggctttggaatatagaccgggcgcaggcgtgtccacagcagaactgccaccgccgtataggccagcgcgataagcacaattttcaggctgaaatactggcttaaatactcgctggcttcgttggtgttggtttcgaacatcacaaacagaacgctctggctgaactcctgaccgtagatgacgtagtagcacagcgccgccagagaggccgcccatagcaccacgccgattactgcggcaataattttaatccgcttcggaaagaggaataccgggatcaaccacaggctactgaataacaggctgtcgcgaatgccgttagtgccactataaccactgatgtaaataatggcctgtagcagagtagagaaaaaccaaaagtagagcagtgcccaacccagggctttccagctaaaaagaggtttagcctggacttctgtggaatgcatagtaagaacctgtcttgaaaaaatatcgccgaatgtaacgacaattccttaaggatatctgaaggtatattcagaatttgaataaaatgcagacagaaatatattgaaaacgagggtgttagaacagaagtatttcagaaaaccctcgcgcaaaagcacgagggtttgcagaagaggaagattagccggtattacgcatacctgccgcaatcccggcaatagtgaccattaacgcttgttcgacgcgaggatccggttcctggccttctttttctgcctggcgggagcggtgcagcaactcggcctgcaatacgttcagcgggtcggtgtaaatattccgtagctgaatagactctgcaatccacggcagatcggccatcagatgggaatcgttggcaatcgccagcaccactttgatgtcttcttcttgcaggttgcgtaactctttacctaacggccacagtgctttgtctaccaggcgttggtcatagtattccgccagccacaggtctgctttggcgaagaccatctccagcatgccgagacgcgtgctgaagaatggccaatcgcggcacatagcctccagctcgctctgtttgccgtcttcgaccactttttgcagcgccgtacctgcacccagccaggcggggagcatcagacggttttgcgtccaggcgaagatccacggaatggcgcgtagactctcgacgccgccggttgggcgacgtttcgccggacgactacccaacggcagtttgcccagttcttgttccggcgtagcggagcggaagtaaggcacaaaatctttgttttcacgtacgtagccgcggtagacatcgcaggagatgacactcagttcatccataatgcgacgccagctctctttcggctccggcggtggcagcaggttggcttccagaatcgccccggtataaaggctcaggctgctgacggtgatttctggcagaccatatttaaagcggatcatctcgccctgttcggttacgcgcaggccgcctttcaggcttcctggcggttgactcagcagcgccgcatgagcaggtgcgccgccgcgaccaatggaaccgccgcgaccgtggaacaacgtcagctcaatacccgctttttcgcaggttttgattaatgcatcctgtgcctgatattgcgcccaggaagctgccatcactcccgcatcttttgcactgtcggaatagccaatcatcaccatctgtttgccctgaatcaggccacgataccagtcaatattgagcagctgggtcatgacatcgttggcgttgttcagatcatcgagggtttcaaacagcggagcaaccggcatcgcaaacccgatacccgcttctttcagcagcaggtggacagccagtacgtcggacggcgttttcgccatgctgatcacgtaggcggcaatggagccttgcggtgcttcggcaatcacctggcaggtatcgagcacttcgcgcgtttcggcgcttggttgccagttgcgcggcagaagcggacgtttggagttcagttcgcggatcaggaacgcctgtttgtcggcctcactccagctttcgtagtcgccgataccgaggtagcgggtcagctcgcccagcgcttcggtatgacgcgtgctctcctgacggatatcaatacggaccagcggtacgccgaaacatttcacgcggcgcagggtgtcgagcagatcgccgttggcgataatacccatgccacacgcctgaagactctggtagcaagcgtagagcggttcccacagttcttcgttttgtgtcagcaggccttctggttttggcagttcttcgcctttcaggcgcgcttccagccatgcctgtgtcgccatcaggcgagaacgcaggtttttcatcagatagcgatacggttctgcggcaccttcttcgccaaccagcgccagcagttcaggggtcgcttcaaccatgctcagttcagaaaccagcacctgaatatctttcaggaacaaatcggtggctttccagcggctgagtagcaggacgtggcgggtgatatcggcagtgacgttcgggttgccgtcgcggtcgccgcccatccagctagtaaaacggaccggaacaaattcgacgggcagtttgtagccgaggttctcttccagttgttcgttcagttcgcgcaggtaatttggtacgccttgccacaggctgttttccactacggcaaagccccatttggcttcatctaccgggcttggacgcagcttacggatttcatcggtatgccaactctgggcgatcaactggcgcaggcgacgcatcagctggttgtgttcgtagtcagcgatatctttgttatcgagctgttttaaacaggcgttcacttccaccattttgtggatcagtgtacgacgggtaatttcggttgggtgagccgtgaggaccagttccaggctcaggctttccactgcttttttgatggtgtcttcgctcagttccggctggtttttcagtttacgcagggtgcgggcgatcacttccgggttgctggcagcttcgcctttcgggctaatgctgtggtattgctcggcggtgttggccaggttcaggaactgactaaacgcacgcgcaacgggcagcagctcgtcgttgctcaaattttgtaaggtggtgagcaactcctggcggttagcatcattgccagcgcgactagatttgctcaacttacggatagtttctacgcgttcaagaatgtgttctcccaacgcatccttgatggtttctcccagcactttgccgagcatactgacattactacgcaatgcggaatattgttcgttcatattaccccagacaccccatcttatcgtttgatagccctgtatccttcacgtcgcattggcgcgaatatgctcgggctttgcttttcgtcgtcttttataaagccacgtaaaagcggtgacgtcaaatgctgcgaaatcgcttcagcaaacgaataaatagcaggaatttacgtcattaaattcacgacgctttaaataagcgtaacttatggaaatgttaaaaaatcgccccaagtaacaccaaaggtgtaggtcggataagatgcgcaagtatcgcatccgacattattgcggcactggagtttggcaacagtgccggatgcggcgcgagcgccttatccggcctacagttgggcatcgtttgagtcactgtcggtcggataagatgcgcaagtatcgcatccgacattattgcggcactggagtttggcaacagtgccggatgcggcgcgagcgccttatccggcctacggttgggcatcgtttgagtcactgtaggtcggataagatgcgcaagcatcgcatccgacattattgcggcactggagtttggcaacagcgccggatgcggcgcgagcgccttatccggcctacgttttaatgccagcaaaaatggtgaattacctgggttatcagttcgcgggtgggcttgataaaccgtgtttccagatattcatcaggttgatgagcctgattaatactgccaggccccaacaccagcgtcgggcataacgtttgaataaacggcgcttcggtacagtagttcaccacttcggtttttgctccgagcaatttctcaaccacttcaaccagttgatgattcggtgggcattcatagccagggatcggcggatgcagctcgtcgaccgtcagacgacccggccagcgttcgctcaccggagccaatgcatcgttgagcaaaccattaagttcattgagtgtcatgccaggcagcggacgaatatccatatgcaactcacagcaagcgcaaatacggttagaagcgtcgccaccgtgaatatgcccgaggttgagcgtagggtatggcacggtaaacgcttcgtagtgataacgttctttcaggttatcgcgcaattgcaaaatatgcccgatggcgtcgtgcattagttcgatagcgttaactccgcgtgctggatcgctggagtgcccgctctggccctgaatacggatggcgttagagatatgacctttatgtgcgcgtaccggttgtagactcgtcggttcgccaatgatggcgcaatccgggcgcagggcggtagtttcggcaaaataacgcgctccggccatactggtttcttcatcagcagtcgccagaatgtagagcggttttttcagtttcgtgacgtcgacatcgcgtagcgcatcaaggataaacgcaaaaaagcctttcatgtcggcggtgcctaagccgtaaagcttgccgtcatgctccgtcagtgtaaacggatcgcgcgtccagcgaccgtcatcaaatggcaccgtatcggtatgccccgccagcaacaagccgccagccccctgtccgatacttgccagcatattgaatttgttgcgagttcctggaacaggctgcacttccacattgaagcccaaatctttaaaccagtccgccagcagagtgattaaatctgcattgctttgatcgagtgcctcttccgtggcgcttatactaggtgtggcaatcagagcgcggtaaatctcgataaatggcggtaatttgtttttcattgttgacacacctctggtcatgatagtatcaatattcatgcagtatttatgaataaaaatacactaacgttgagcgtaataaaacccaccagccgtaaggtgaatgttttacgtttaacctggcaaccagacataagaaggtgaatagccccgatgttgaatacgctgattgtgggtgccagcggctacgctggcgcagagctagtgacctatgtaaatcgccatccgcatatgaacataaccgctttgactgttagtgcgcaaagcaatgatgcgggaaagttaatctccgatttgcatccgcagctaaaaggcatcgttgatctgccgttgcagccgatgagcgatatcagcgagtttagcccaggggtggacgtagtgtttctcgccaccgcccatgaagttagccacgatttagcgccgcagtttcttgaagcgggctgcgtggtgttcgacctttccggcgcgtttcgtgttaacgacgccaccttctatgaaaaatattacggctttacccatcaatacccggaactgttggaacaggcagcctacggtctggcggagtggtgcggtaataaattaaaagaagcgaatttgattgcggtgccgggctgttatccgacggcggcacagctggcgctgaaaccgttgattgatgccgatcttcttgacctcaatcagtggccggtgatcaacgccaccagcggcgtgagcggtgcagggcgtaaagcggccattagtaacagcttttgtgaagttagcctgcaaccgtatggcgtctttactcatcgccatcaaccagagatcgccacacacctcggtgctgacgttatcttcaccccacatctgggcaatttcccgcgcggcattctcgaaaccattacctgccgcctgaaaagcggtgtgacccaggcgcaagtcgcgcaagtgttacagcaggcgtatgcccataaaccgctggtgcggctgtatgacaaaggcgttccggcgctgaaaaatgtcgttgggctgccattttgcgatatcgggtttgccgttcagggcgagcatctgattattgtggcgaccgaagacaacttactgaaaggcgcggcggcacaagcggtacagtgcgccaatattcgtttcggctatgcggaaacgcagtctcttatttaagggtgcaatgatgaatccattaattatcaaactgggcggcgtactgctggatagtgaagaggcgctggaacgtctgtttagcgcactggtgaattatcgtgagagtcatcagcgtccgctggtgattgtgcacggcggcggttgcgtggtggatgagctgatgaaagggctgaatctgccggtgaaaaagaaaaacggcctgcgggtgacgcctgctgatcagatagacattatcaccggagcactggcgggaacggcaaataaaaccctgttggcatgggcgaagaaacatcagattgcggccgtaggtttgtttctcggtgacggcgacagcgtcaaagtgacccagcttgatgaagagttaggtcatgttggactggcgcagccaggtagccctaagcttatcaactccttgctggagaacggttatctgccggtggtcagctccattggcgtaacagacgaagggcaactgatgaacgtcaatgccgaccaggcggcaacggcgctggcggcaacgctgggcgcggatctgattttgctctccgacgtcagcggcattctcgacggcaaagggcaacgcattgccgaaatgaccgccgcgaaagcagaacaactgattgagcagggcattattactgacggcatgatagtgaaagtgaacgcggcgctggatgcggcccgcacgctgggccgtccggtagatatcgcctcctggcgtcatgcggagcagcttccggcactgtttaacggtatgccgatgggtacgcggattttagcttaagttttgttggccggaggcgcagctttccggcattgaatttcaaaataaggaaacagagttatggcactttggggcgggcgttttacccaggcagcagatcaacggttcaaacaattcaacgacagtctgcgctttgattaccgtctggcggagcaggatattgttggctctgtggcctggtccaaagccctggtcacggtaggcgtgttaaccgcagaagagcaggcgcaactggaagaggcgctgaacgtgttgctggaagatgttcgcgccaggccacaacaaatccttgaaagcgacgccgaagatatccatagctgggtggaaggcaaactgatcgacaaagtgggccagttaggcaaaaagctgcataccgggcgtagccgtaatgatcaggtagcgactgacctgaaactgtggtgcaaagataccgttagcgagttactgacggctaaccggcagctgcaaagcgcgctggtggaaaccgcacaaaacaatcaggacgcggtaatgccaggttacactcacctgcaacgcgcccagccggtgacgttcgcgcactggtgcctggcctatgttgagatgctggcgcgtgatgaaagccgtttgcaggatgcgcttaagcgtctggatgtcagcccgctaggctgtggcgcgctggcgggaacggcctatgaaatcgaccgtgaacagttagcaggctggctgggctttgctagcgcgacccgtaacagtctcgacagcgtttctgaccgtgaccatgtgttggaactgctttctgctgccgctatcggcatggtgcatctgagccgttttgctgaagatctgattttctttaacaccggcgaagcggggtttgtggagctttctgaccgcgtgacttccggtagtagtttaatgccgcagaagaaaaacccggatgcgctggagctgattcgcggtaaatgcggccgggtgcagggggcgttaaccggcatgatgatgacgctgaaaggtttgccgctggcttacaacaaagatatgcaggaagacaaagaaggtctgttcgacgcgctcgatacctggctggactgcctgcatatggcggcgctggtgctggacggcattcaggtgaaacgtccacgttgccaggaagcggctcagcagggttacgccaacgccaccgaactggcggattatctggtggcgaaaggcgtaccgttccgcgaggcgcaccatattgttggtgaagcggtggtggaagccattcgtcagggcaaaccgctggaagatctgccgctcagtgagttgcagaaattcagtcaggtgattgacgaagatgtctatccgattctgagcctgcaaagctgcctcgacaagcgtgcggcaaaaggcggcgtcagtccgcagcaggtggcgcaggcgattgcttttgcgcaggctcggttagggtaagaacatttatatgtataaatttgagcctggcttatcgccgggcttttttatggcaaaaaaaagcggatcctggagatccgcaaaagttcacgttggctttagttattcgagttgagaaactctcgaaacgggcagtgacttcaagggttaaaagaggtgccgctccgtttctgtgagcaattatcagtcagaatgcttgatagggataatcgttcattgctattctacctatcgccatgaactatcgtggcgatggaggatggataatgaatattcgtgatcttgagtacctggtggcattggctgaacaccgccattttcggcgtgcggcagattcctgccacgttagccagccgacgcttagcgggcaaattcgtaagctggaagatgagctgggcgtgatgttgctggagcggaccagccgtaaagtgttgttcacccaggcgggaatgctgctggtggatcaggcgcgtaccgtgctgcgtgaggtgaaagtccttaaagagatggcaagccagcagggcgagacgatgtccggaccgctgcacattggtttgattcccacagttggaccgtacctgctaccgcatattatccctatgctgcaccagacctttccaaagctggaaatgtatctgcatgaagcacagacccaccagttactggcgcaactggacagcggcaaactcgattgcgtgatcctcgcgctggtgaaagagagcgaagcattcattgaagtgccgttgtttgatgagccaatgttgctggctatctatgaagatcacccgtgggcgaaccgcgaatgcgtaccgatggccgatctggcaggggaaaaactgctgatgctggaagatggtcactgtttgcgcgatcaggcaatgggtttctgttttgaagccggggcggatgaagatacacacttccgcgcgaccagcctggaaactctgcgcaacatggtggcggcaggtagcgggatcactttactgccagcgctggctgtgccgccggagcgcaaacgcgatggggttgtttatctgccgtgcattaagccggaaccacgccgcactattggcctggtttatcgtcctggcagtccgctgcgcagccgctatgagcagctggcagaggccatccgcgcaagaatggatggccatttcgataaagttttaaaacaggcggtttaaaccgtttaacgcagctacccgataggcttccgccatcgtcgggtagttaaaggtggtgttgacgaagtactcaatagtgttgccgccacctttctgttccataatcgcctgaccgatatgaataatttcggcagcgcgctcgccaaagcagtgaatacccagaatctcttttgtttcccgatggaacaaaattttcagcgtgcccacgttcatgccgacgatttgtgcgcgtgccagatgtttaaactgggcgcggcccacttcatatggcactttcattgcggtcagctgctgttcggttttgcccacagagctgatttccgggatggtgtaaataccggtagggatatcttcaatcagatgtgcggtggcttcgccttttaccagcgcctgcgcggcaatgcgcccctggtcataggccgcgctcgccaggctcggataaccaatcacgtcgcccaccgcgtaaacgtgtggctgtgcggtctgatacatgctgttgaccttcagctgtccgcggctgtcagtttctagcccaatgttctgtaacgccaggctatcggtattaccggtgcgaccgttggcatagagcaggcagtcagctttcagttttttaccgctcttcagatgcatgatcacaccatcgtcacagccttcgatcttctcgtactcttcgttgtgacgaatcactacgccactgttccagaagtgataggagagagaatcactcatctcttgatcgagaaatgccagcaggcgatcgcgggtgttgatcagatccacttttacatccataccgcggaagatgctcgcatattcacagccgatcactccagcaccatagataagtacatggcgcggttcgtggtgcatgctgagaatactgtcgctgtcgtaaatgcgtggatgggtgaaatcaacatctgttggatgatatggacgagagccgcaggcaataacaaatttttcagcggttagtgtttcaacgctgccgtccgggcaatccagcgccaacgtatgctcgtcaacaaagcgagcgtttccctgcaatatttcacagtgattacgttcgtaaaatccctgacgcatgcgcgtttgttgattaatcacgttatcggcatggttaaggatatcggcaaaagaagagcggagcagtcgggaatggtcgctgtaaagtgggttttgattgaattctataatgcggctgacggcgtgacggagagctttgctcgggatggtgccccagtgggtgcaaccgccgccaacattttgataacgctcgataactgcgacgcgcgcaccttgcttaaccaggcccattgcagcgccttcgccgccggggccggaacctattactatggcatcgtaatcgtaggaatgtggcatggtagggcttacctgttcttatacataaaagcaacagaatggtaacattttatcgcgggtaagccaattgatccccgtcatttatctggctatatcctgagcggcctttgctttgtctgtttcttacttttgccctgacgttttattggatttttatcgacgatactctccgtttaagcggcaggtttccgctgtacgtaaaagaaccggccaaagaattgcagtaaatatgttttattgcgttaccgttcattcacaatactggagcaatccagtatgttcattctctggtatagtgccagcagtacttttggcaaggatagtgacatcgtgatgggcgtaagagcgcaacaaaaagaaaaaacccgccgtagcctggtggaagccgcatttagccaattaagtgctgaacgcagcttcgccagcctgagtttgcgtgaagtggcgcgtgaagcgggcattgctcccacctctttttatcggcatttccgcgacgtagacgaactgggtctgaccatggttgatgagagcggtttaatgctacgccaactcatgcgccaggcgcgtcagcgtatcgccaaaggcgggagtgtgatccgcaccagcgtctccacatttatggagttcatcggtaataatcctaacgccttccggttattattgcgggaacgctccggcacctccgctgcgtttcgtgccgccgttgcgcgtgaaattcagcacttcattgcggaacttgcggactatctggaactcgaaaaccatatgccgcgtgcgtttactgaagcgcaagccgaagcaatggtgacaattgtcttcagtgcgggtgccgaggcgttggacgtcggcgtcgaacaacgtcggcaattagaagagcgactggtactgcaactgcgaatgattagcaaaggggcttattactggtatcgccgtgaacaagagaaaaccgcaattattccgggaaatgtgaaggacgagtaatgaaacaagcaaatcaagatagaggtacgctgctgctggcgttagttgctggcttaagcattaatggtactttcgcagcgctgtttagctccattgtgccattttctgtattcccgattatttccctggtgctgacggtttactgcctgcatcaacgttatcttaatcgcactatgccggtaggcttgccgggtctggcagctgcctgttttattctcggcgtactgctgtacagcacggtagttcgtgcggaatatccggatatcggctctaacttcttcccggcagtactctccgtcattatggtgttctggattggcgcgaagatgcgtaaccgtaagcaggaagttgctgagtaatcggtattatgccggatgctggcgcatccggcatgggttttacttcgcggtcagtaatacgccgcactccatatggtgcgtgtaggggaactgatcaaacagagccagacgttcgaccttgtgcgtctggcttaatgtttccagattcttgcataacgtttccgggttacaggagatgtacaaaatacgcggatacgcctgcaccattttctcggtttcactgtccagaccgctgcgcggagggtcgacaaaaatggtttcgcactgataactctttaagtcgatcccttgcaggcggttaaactcgcgcacaccattcatcgcctgagtaaattcttctgccgccatacgaataatttgtacgttatcaatatggttagctgcgatgttgtattgcgcagcagcaacgctcggcttagcgatttcggtggctaatacccgatcaaaattacgcgccagcgctaaactaaagttaccgttgccgcagtacagctccagtaaatcgcctttactgcctttggttacgtccagcgcccattccagcatctgaatattcatcgccgcgttcggctgggtaaagctgttttctacctgacggtagatcatctctttccctgcgaccggcagacgttcatcgatgtaatcctgatccagctcgattttggttttcgttgcccgaccaatcagatgcacattcagattctgcgcgcgcagtgcatcgcgcagggcctccgcttcctgacgccactcatcatccagcttcttatggtatagcagggaaaccaccgcctgattactcagtgtagtgaggtaatcaatctggaacaacttgtggcgcagaacgggattattacgcacacccgcaatcatcgccgtcatcaactggttgataagttcactggcggcggggaagctatccacgcggatgcggcttttggtttgttgatcgaaaatgatgtgatacaggtcatcgccatcgtgccagatgcggaactccgcgcgcatccggtaatgactgaccgggctgcgaaacacttccggaaccaggtcagaaaacggtgccatcatactttgcaaacgtaccactttttcggctaactgcgcttcatactgttctgttggaaggtgttcgggggtcatgatgtatcctgaaaaattaaagtacgcggcgattgtagggattgctcatcagatgtccagatcttgatgaattcctatttgtgagctacgtctggacagtaacttgttacaacctgtagcatccacttgccggtcctgtgagttaatagggaatccagtgcgaatctggagctgacgcgcagcggtaaggaaaggtgcgatgattgcgttatgcggacactgccattcggtgggaagtcatcatctcttagtatcttagatacccctccaagcccgaagacctgccggccaacgtcgcatctggttctcatcatcgcgtaatattgatgaaacctgcggcatccttcttctattgtggatgctttacaatgattaaaaaagctagcctgctgacggcgtgttccgtcacggcattttccgcttgggcacaggataccagcccggatactctcgtcgttactgctaaccgttttgaacagccgcgcagcactgtgcttgcaccaaccaccgttgtgacccgtcaggatatcgaccgctggcagagcaccagcgtcaatgatgtgctgcgccgtcttccgggcgtcgatatcacccaaaacggcggtagtggtcagctcagttctatttttattcgcggtacaaatgccagtcatgtgttggtgttaattgatggcgtacgcctgaatctggcgggggtgagtggttctgccgaccttagccagttccctattgcgcttgtccagcgtgttgaatatatccgtgggccgcgctccgctgtttatggttccgatgcaataggcggggtggtgaatatcatcacgacgcgcgatgaacccggaacggaaattagtgcagggtggggaagcaatagttatcagaactatgatgtctctacgcagcaacaactgggggataagacacgggtaacgctgttgggcgattatgcccatactcatggttatgatgttgttgcctatggtaataccggaacgcaagcgcagacagataacgatggttttttaagtaaaacgctttatggcgcgctggagcataactttactgatgcctggagcggctttgtgcgcggctatggctatgataaccgtaccaattatgacgcgtattattctcccggtagtccgttgctcgatacccgtaaactctatagccaaagttgggacgccgggctgcgctataacggcgaactgattaaaagtcaactcattaccagctatagccatagcaaagattacaactacgatccccattatggtcgttatgatagcagcgcgacgctcgatgagatgaagcaatacaccgtccagtgggcaaacaatgtcatcgttggtcacggtagtattggtgcgggtgtcgactggcagaaacagactacgacgccgggtacaggttatgttgaggatggatatgatcaacgtaataccggcatctatctgaccgggctgcaacaagtcggcgattttacctttgaaggcgcagcacgcagtgacgataacagtcagtttggtcgtcatggaacctggcaaaccagcgccggttgggaattcatcgaaggttatcgcttcattgcttcctacgggacatcttataaggcaccaaatctggggcaactgtatggcttctacggaaatccgaatctggacccggagaaaagcaaacagtgggaaggcgcgtttgaaggcttaaccgctggggtgaactggcgtatttccggatatcgtaacgatgtcagtgacttgatcgattatgatgatcacaccctgaaatattacaacgaagggaaagcgcggattaagggcgtcgaggcgaccgccaattttgataccggaccactgacgcatactgtgagttatgattatgtcgatgcgcgcaatgcgattaccgacacgccgttgttacgccgtgctaaacagcaggtgaaataccagctcgactggcagttgtatgacttcgactggggtattacttatcagtatttaggcactcgctatgataaggattacagttcttatccttatcaaaccgttaaaatgggcggtgtgagcttgtgggatcttgcggttgcgtatccggtcacctctcacctgacagttcgtggtaaaatagccaacctgttcgacaaagattatgagacagtctatggctaccaaactgcaggacgggaatacaccttgtctggcagctacaccttctgaaccacgtcccaccgtgctggtgtttgactccggcgtcggtgggttgagcgtctatgacgagatccggcatctcttaccggatctccattacatttatgctttcgataacgtcgctttcccgtatggcgaaaaaagcgaagcgtttattgttgagcgagtggtggcaattgtcaccgcggtgcaagaacgttatccccttgcgctggctgtggtcgcttgcaacactgccagtaccgttagtcttcctgcattacgcgaaaagttcgacttcccggttgttggtgtcgtgccggcgattaaacctgctgcacgtctgacggcaaatggcattgtcggattactggcaacccgcggaacagttaaacgttcttatactcatgagctgatcgcgcgtttcgctaatgaatgccagatagaaatgctgggcagcgcagagatggttgagttggctgaagcgaagctacatggcgaagatgtttctctggatgcactaaaacgtatcctacgcccgtggttaagaatgaaagagccgccagataccgttgtattgggttgcacccatttccctctactacaagaagaactgttacaagtgctgccagagggaacccggctggtggattctggcgcagcgattgctcgccgaacggcctggttgttagaacatgaagccccggatgcaaaatctgccgatgcgaatattgccttttgtatggcaatgacgccaggagctgaacaattattgcccgttttacagcgttacggcttcgaaacgctcgaaaaactggcagttttaggctgatttggttgaatgttgcgcggtcagaaaattattttaaatttcctcttgtcaggccggaataactccctataatgcgccaccactgacacggaacaacggcaaacacgccgccgggtcagcggggttctcctgagaactccggcagagaaagcaaaaataaatgcttgactctgtagcgggaaggcgtattatgcacaccccgcgccgctgagaaaaagcgaagcggcactgctctttaacaatttatcagacaatctgtgtgggcactcgaagatacggattcttaacgtcgcaagacgaaaaatgaataccaagtctcaagagtgaacacgtaattcattacgaagtttaattctttgagcgtcaaacttttaaattgaagagtttgatcatggctcagattgaacgctggcggcaggcctaacacatgcaagtcgaacggtaacaggaagaagcttgcttctttgctgacgagtggcggacgggtgagtaatgtctgggaaactgcctgatggagggggataactactggaaacggtagctaataccgcataacgtcgcaagaccaaagagggggaccttcgggcctcttgccatcggatgtgcccagatgggattagctagtaggtggggtaacggctcacctaggcgacgatccctagctggtctgagaggatgaccagccacactggaactgagacacggtccagactcctacgggaggcagcagtggggaatattgcacaatgggcgcaagcctgatgcagccatgccgcgtgtatgaagaaggccttcgggttgtaaagtactttcagcggggaggaagggagtaaagttaatacctttgctcattgacgttacccgcagaagaagcaccggctaactccgtgccagcagccgcggtaatacggagggtgcaagcgttaatcggaattactgggcgtaaagcgcacgcaggcggtttgttaagtcagatgtgaaatccccgggctcaacctgggaactgcatctgatactggcaagcttgagtctcgtagaggggggtagaattccaggtgtagcggtgaaatgcgtagagatctggaggaataccggtggcgaaggcggccccctggacgaagactgacgctcaggtgcgaaagcgtggggagcaaacaggattagataccctggtagtccacgccgtaaacgatgtcgacttggaggttgtgcccttgaggcgtggcttccggagctaacgcgttaagtcgaccgcctggggagtacggccgcaaggttaaaactcaaatgaattgacgggggcccgcacaagcggtggagcatgtggtttaattcgatgcaacgcgaagaaccttacctggtcttgacatccacggaagttttcagagatgagaatgtgccttcgggaaccgtgagacaggtgctgcatggctgtcgtcagctcgtgttgtgaaatgttgggttaagtcccgcaacgagcgcaacccttatcctttgttgccagcggtccggccgggaactcaaaggagactgccagtgataaactggaggaaggtggggatgacgtcaagtcatcatggcccttacgaccagggctacacacgtgctacaatggcgcatacaaagagaagcgacctcgcgagagcaagcggacctcataaagtgcgtcgtagtccggattggagtctgcaactcgactccatgaagtcggaatcgctagtaatcgtggatcagaatgccacggtgaatacgttcccgggccttgtacacaccgcccgtcacaccatgggagtgggttgcaaaagaagtaggtagcttaaccttcgggagggcgcttaccactttgtgattcatgactggggtgaagtcgtaacaaggtaaccgtaggggaacctgcggttggatcacctccttaccttaaagaagcgtactttgtagtgctcacacagattgtctgatagaaagtgaaaagcaaggcgtttacgcgttgggagtgaggctgaagagaataaggccgttcgctttctattaatgaaagctcaccctacacgaaaatatcacgcaacgcgtgataagcaattttcgtgtccccttcgtctagaggcccaggacaccgccctttcacggcggtaacaggggttcgaatcccctaggggacgccacttgctggtttgtgagtgaaagtcgccgaccttaatatctcaaaactcatcttcgggtgatgtttgagatatttgctctttaaaaatctggatcaagctgaaaattgaaacactgaacaacgagagttgttcgtgagtctctcaaattttcgcaacacgatgatgaatcgaaagaaacatcttcgggttgtgaggttaagcgactaagcgtacacggtggatgccctggcagtcagaggcgatgaaggacgtgctaatctgcgataagcgtcggtaaggtgatatgaaccgttataaccggcgatttccgaatggggaaacccagtgtgtttcgacacactatcattaactgaatccataggttaatgaggcgaaccgggggaactgaaacatctaagtaccccgaggaaaagaaatcaaccgagattcccccagtagcggcgagcgaacggggagcagcccagagcctgaatcagtgtgtgtgttagtggaagcgtctggaaaggcgcgcgatacagggtgacagccccgtacacaaaaatgcacatgctgtgagctcgatgagtagggcgggacacgtggtatcctgtctgaatatggggggaccatcctccaaggctaaatactcctgactgaccgatagtgaaccagtaccgtgagggaaaggcgaaaagaaccccggcgaggggagtgaaaaagaacctgaaaccgtgtacgtacaagcagtgggagcacgcttaggcgtgtgactgcgtaccttttgtataatgggtcagcgacttatattctgtagcaaggttaaccgaataggggagccgaagggaaaccgagtcttaactgggcgttaagttgcagggtatagacccgaaacccggtgatctagccatgggcaggttgaaggttgggtaacactaactggaggaccgaaccgactaatgttgaaaaattagcggatgacttgtggctgggggtgaaaggccaatcaaaccgggagatagctggttctccccgaaagctatttaggtagcgcctcgtgaattcatctccgggggtagagcactgtttcggcaagggggtcatcccgacttaccaacccgatgcaaactgcgaataccggagaatgttatcacgggagacacacggcgggtgctaacgtccgtcgtgaagagggaaacaacccagaccgccagctaaggtcccaaagtcatggttaagtgggaaacgatgtgggaaggcccagacagccaggatgttggcttagaagcagccatcatttaaagaaagcgtaatagctcactggtcgagtcggcctgcgcggaagatgtaacggggctaaaccatgcaccgaagctgcggcagcgacgcttatgcgttgttgggtaggggagcgttctgtaagcctgcgaaggtgtgctgtgaggcatgctggaggtatcagaagtgcgaatgctgacataagtaacgataaagcgggtgaaaagcccgctcgccggaagaccaagggttcctgtccaacgttaatcggggcagggtgagtcgacccctaaggcgaggccgaaaggcgtagtcgatgggaaacaggttaatattcctgtacttggtgttactgcgaaggggggacggagaaggctatgttggccgggcgacggttgtcccggtttaagcgtgtaggctggttttccaggcaaatccggaaaatcaaggctgaggcgtgatgacgaggcactacggtgctgaagcaacaaatgccctgcttccaggaaaagcctctaagcatcaggtaacatcaaatcgtaccccaaaccgacacaggtggtcaggtagagaataccaaggcgcttgagagaactcgggtgaaggaactaggcaaaatggtgccgtaacttcgggagaaggcacgctgatatgtaggtgaggtccctcgcggatggagctgaaatcagtcgaagataccagctggctgcaactgtttattaaaaacacagcactgtgcaaacacgaaagtggacgtatacggtgtgacgcctgcccggtgccggaaggttaattgatggggttagcgcaagcgaagctcttgatcgaagccccggtaaacggcggccgtaactataacggtcctaaggtagcgaaattccttgtcgggtaagttccgacctgcacgaatggcgtaatgatggccaggctgtctccacccgagactcagtgaaattgaactcgctgtgaagatgcagtgtacccgcggcaagacggaaagaccccgtgaacctttactatagcttgacactgaacattgagccttgatgtgtaggataggtgggaggctttgaagtgtggacgccagtctgcatggagccgaccttgaaataccaccctttaatgtttgatgttctaacgttgacccgtaatccgggttgcggacagtgtctggtgggtagtttgactggggcggtctcctcctaaagagtaacggaggagcacgaaggttggctaatcctggtcggacatcaggaggttagtgcaatggcataagccagcttgactgcgagcgtgacggcgcgagcaggtgcgaaagcaggtcatagtgatccggtggttctgaatggaagggccatcgctcaacggataaaaggtactccggggataacaggctgataccgcccaagagttcatatcgacggcggtgtttggcacctcgatgtcggctcatcacatcctggggctgaagtaggtcccaagggtatggctgttcgccatttaaagtggtacgcgagctgggtttagaacgtcgtgagacagttcggtccctatctgccgtgggcgctggagaactgaggggggctgctcctagtacgagaggaccggagtggacgcatcactggtgttcgggttgtcatgccaatggcactgcccggtagctaaatgcggaagagataagtgctgaaagcatctaagcacgaaacttgccccgagatgagttctccctgaccctttaagggtcctgaaggaacgttgaagacgacgacgttgataggccgggtgtgtaagcgcagcgatgcgttgagctaaccggtactaatgaaccgtgaggcttaaccttacaacgccgaagctgttttggcggatgagagaagattttcagcctgatacagattaaatcagaacgcagaagcggtctgataaaacagaatttgcctggcggcagtagcgcggtggtcccacctgaccccatgccgaactcagaagtgaaacgccgtagcgccgatggtagtgtggggtctccccatgcgagagtagggaactgccaggcatcaaataaaacgaaaggctcagtcgaaagactgggcctttcgttttatctgttgtttgtcggtgaacgctctcctgagtaggacaaatccgccgggagcggatttgaacgttgcgaagcaacggcccggagggtggcgggcaggacgcccgccataaactgccaggcatcaaattaagcagaaggccatcctgacggatggcctttttgcgtttctacaaactcttcctgtcgtcatatctacaagccatccccccacagatacggtaaactagcctcgtttttgcatcaggaaagcagctatgaaccactccttaaaaccctggaacacatttggcattgatcataatgctcagcacattgtatgtgccgaagacgaacaacaattactcaatgcctggcagtatgcaaccgcagaaggacaacccgttcttattctgggtgaaggaagtaatgtactttttctggaggactatcgcggcacggtgatcatcaaccggatcaaaggtatcgaaattcatgatgaacctgatgcgtggtatttacatgtaggagccggagaaaactggcatcgtctggtaaaatacactttgcaggaaggtatgcctggtctggaaaatctggcattaattcctggttgtgtcggcagtagtcctatccagaatattggtgcttatggcgtagaattacagcgagtttgcgcttatgttgattctgttgaactggcgacaggcaagcaagtgcgcttaactgccaaagagtgccgttttggctatcgcgacagtatttttaaacatgaataccaggaccgcttcgctattgtagccgtaggtctgcgtctgccaaaagagtggcaacctgtactaacgtatggtgacttaactcgtctggatcctacaacagtaacgccacagcaagtatttaatgcggtgtgtcatatgcgcaccaccaaactccctgatccaaaagtgaatggcaatgccggtagtttcttcaaaaaccctgttgtatctgccgaaacggctaaagcattactgagtcaatttccaacagcaccaaattacccccaggcggatggtagtgtaaaactggcagcaggttggcttatcgatcagtgccagctaaaagggatgcaaataggtggggctgcggtgcaccgtcaacaggcgttagttctcattaatgaagacaatgcaaaaagcgaagatgttgtacagctggcgcatcatgtaagacagaaagttggtgaaaaatttaatgtctggcttgagcctgaagtccgctttattggtgcaagtggtgaagtgagcgcagtggagacaattagttgaaataaagcgcagtggagacaatttcatgaaggataacaccgtgccactgaaattgattgccctgttagcgaacggtgaatttcactctggcgagcagttgggtgaaacgctgggaatgagccgggcggctattaataaacacattcagacactgcgtgactggggcgttgatgtctttaccgttccgggtaaaggatacagcctgcctgagcctatccagttacttaatgctaaacagatattgggtcagctggatggcggtagtgtagccgtgctgccagtgattgactccacgaatcagtaccttcttgatcgtatcggagagcttaaaagcggcgatgcttgcattgcagaataccagcaggctggccgtggtcgccggggtcggaaatggtttagcccttttggcgcaaacttatatttgagcatgttctggcgtctggaacaaggcccggcggcggcgattggtttaagtctggttatcggtatcgtgatggcggaagtattacgcaagctgggtgcagataaagttcgtgttaaatggcctaatgacctctatctgcaggatcgcaagctggcaggcattctggtggagctgactggcaaaactggcgatgcggcgcaaatagtcattggagccgggatcaacatggcaatgcgccgtgttgaagagagtgtcgttaatcaggggtggatcacgctgcaggaagcggggatcaatctcgatcgtaatacgttggcggccatgctaatacgtgaattacgtgctgcgttggaactcttcgaacaagaaggattggcaccttatctgagccgctgggaaaagctggataattttattaatcgcccagtgaaacttatcattggtgataaagaaatatttggcattagtcgcggaatagacaaacagggggctttattacttgagcaggatggaataataaaaccctggatgggcggtgaaatatccctgcgtagtgcagaaaaataagaaaggggagtattcgctcccctgcaaattatttgcgtagtctgacctcttctaccgcatgattagcacttttcgtcaggattaaactggcgcgctcacgagtaggtagaatattttgctttaagttcagccagttgatctctttccacaatgtcatggcagtcttaatcgcttcttctttagttaatttcgcgtagttatgaaaataggaatccgggtcggtaaaagccccttcgcggaatttcagaaaacggttgatataccatgtctgaagtaagtcttccggtgcatcaacatatatgctaaaatcgacaaaatcagaaacaaatacatgatgtggatcgtgtggataatccatcccgctctgtaagacatttaacccttcaagaattaaaatatcaggctgaacaaccgttttatctccatccgggatcacatcataaataagatgactgtaaacaggtgctgtaacgtttggcacgccggatttgagatcggaaacaaacttcaccaggcgatgcatatcatagctttccgggaagcctttcttcttcatcagaccacgttctttcagaacctgattagggtgaaggaagccatctgtagtgatcagttcaacacgacgatgttccggccaacggcttaatagcgcctgcaatacacgggcggttgtacttttccccaccgcgacactgccagcaatactgataatgtaaggaatgcgttgcccgttggtaccaagaaactgttccagaactgcctgacggcgcagattgctgcttatatagaagttcagcaaacgactcaaaggtaaatagatctcggcaacttcttctaagctgagatcttcattaatacctttgagacgggcgatctcatcttcgcttaacgtcataggtacggaatcacgcagagctgcccactggttgcggtcaaactgtaggtaaggcgtcattaacgtttgctcttttatactcataagcatgtttctggcggtcatagctctatcggcaaagcgatatttgccatggcgcgtcacagttctgttgaatgggttaatgggcaggagggtaacaccagatggggaggaataataagaaaaaatctctgccaggaagctatcgttgaaaagcaatgtgacagatattccatctgataaaaagaattatggtttagcaggagcgcattgttgagcacaatgatgttgaaaaagtgtgctaatctgccctccgttcggctgtttcttcatcgtgtcgcataaaatgtgaccaataaaacaaattatgcaattttttagttgcatgaactcgcatgtctccatagaatgcgcgctacttgatgccgacttagctcagtaggtagagcaactgacttgtaatcagtaggtcaccagttcgattccggtagtcggcaccatcaagtccggtggggttcccgagcggccaaagggagcagactgtaaatctgccgtcacagacttcgaaggttcgaatccttcccccaccaccaatttcggccacgcgatggcgtagcccgagacgataagttcgcttaccggctcgaataaagagagcttctctcgatattcagtgcagaatgaaaatcaggtagccgagttccaggatgcgggcatcgtataatggctattacctcagccttccaagctgatgatgcgggttcgattcccgctgcccgctccaagatgtgctgatatagctcagttggtagagcgcacccttggtaagggtgaggtcggcagttcgaatctgcctatcagcaccacttcttttctcctccctgttttttccttctgtttattgcattcaacaagtcgggcatgttgcctggttgatgtggtgatatcaccgatttatccgtgtcttagagggacaatcgatgtctaaagaaaagtttgaacgtacaaaaccgcacgttaacgtcggtactatcggccacgttgaccatggtaaaacaacgctgaccgctgcaatcactaccgtactggctaaaacctacggcggtgctgctcgcgcattcgaccagatcgataacgcgccggaagaaaaagctcgtggtatcaccatcaacacttctcacgttgaatacgacaccccgacccgtcactacgcacacgtagactgcccggggcacgccgactatgttaaaaacatgatcaccggtgctgcgcagatggacggcgcgatcctggtagttgctgcgactgacggcccgatgccgcagactcgtgagcacatcctgctgggtcgtcaggtaggcgttccgtacatcatcgtgttcctgaacaaatgcgacatggttgatgacgaagagctgctggaactggttgaaatggaagttcgtgaacttctgtctcagtacgacttcccgggcgacgacactccgatcgttcgtggttctgctctgaaagcgctggaaggcgacgcagagtgggaagcgaaaatcctggaactggctggcttcctggattcttacattccggaaccagagcgtgcgattgacaagccgttcctgctgccgatcgaagacgtattctccatctccggtcgtggtaccgttgttaccggtcgtgtagaacgcggtatcatcaaagttggtgaagaagttgaaatcgttggtatcaaagagactcagaagtctacctgtactggcgttgaaatgttccgcaaactgctggacgaaggccgtgctggtgagaacgtaggtgttctgctgcgtggtatcaaacgtgaagaaatcgaacgtggtcaggtactggctaagccgggcaccatcaagccgcacaccaagttcgaatctgaagtgtacattctgtccaaagatgaaggcggccgtcatactccgttcttcaaaggctaccgtccgcagttctacttccgtactactgacgtgactggtaccatcgaactgccggaaggcgtagagatggtaatgccgggcgacaacatcaaaatggttgttaccctgatccacccgatcgcgatggacgacggtctgcgtttcgcaatccgtgaaggcggccgtaccgttggcgcgggcgttgtagcaaaagttctgagctaattgccgataacatttgacgcaatgcgcactaaaagggcatcatttgatgccctttttgcacgctttcgtaccagaacctggctcatcagtgattttctttgtcataatcattgctgagacaggctctgttgagggcgtataatccgaaaagctaatacgcgtttcgatttggtttgcctcgcgatcgcggggtgaaaatgtttgtagaaaacttctgacaggttggtttatgagtgcgaataccgaagctcaaggaagcgggcgcggcctggaagcgatgaagtgggtcgttgtggtggcattgctcctggtggcgattgtcggcaactatctttatcgcgacattatgctgccgctgcgtgcgctggccgtagtaattctgattgctgcagcgggtggtgtcgcgctgttaacgacaaaaggtaaagctaccgttgcttttgcccgtgaagcgcgtaccgaagtccgtaaggtcatttggccgactcgccaggaaacattgcacaccacgctgattgtggctgcggttaccgcagtaatgagtctgatcctgtggggactggatggtattctggttcgcctggtatcctttatcactggcctgaggttctgagatgtctgaagctcctaaaaagcgctggtacgtcgttcaggcgttttccggttttgaaggccgcgtagcaacgagcctgcgtgagcatatcaaattacacaacatggaagatttgtttggtgaagtcatggtaccaaccgaagaagtggttgaaatccgtggcggtcagcgtcgcaaaagcgaacgtaaattcttccctggctacgtcctcgttcagatggtgatgaacgacgcgagctggcacctggtgcgcagcgtaccgcgtgtgatgggcttcatcggcggtacttccgatcgtcctgcgccaatcagcgataaagaagtcgatgcgattatgaaccgcctgcagcaggttggtgataagccgcgtccgaaaacgctgtttgaaccgggtgaaatggtccgtgttaatgatggtccgttcgctgacttcaacggtgttgttgaagaagtggattacgagaaatctcgtctgaaagtgtctgtttctatcttcggtcgtgcgaccccggtagagctggacttcagccaggttgaaaaagcctaacccagcgatcaaaaaagcggcgatttaatcgttgcacaaggcgtgagattggaatacaatttcgcgccttttgtttttatgggccttgcccgtaaaacgattttttatatcacggggagcctctcagaggcgttattacccaacttgaggaatttataatggctaagaaagtacaagcctatgtcaagctgcaggttgcagctggtatggctaacccgagtccgccagtaggtccggctctgggtcagcagggcgtaaacatcatggaattctgcaaagcgttcaacgcaaaaactgattccatcgaaaaaggtctgccgattccggtagtaatcaccgtttacgctgaccgttctttcactttcgttaccaagaccccgccggcagcagttctgctgaaaaaagcggctggtatcaagtctggttccggtaagccgaacaaagacaaagtgggtaaaatttcccgcgctcagctgcaggaaatcgcgcagaccaaagctgccgacatgactggtgccgacattgaagcgatgactcgctccatcgaaggtactgcacgttccatgggcctggtagtggaggactaagaaatggctaaactgaccaagcgcatgcgtgttatccgcgagaaagttgatgcaaccaaacagtacgacatcaacgaagctatcgcactgctgaaagagctggcgactgctaaattcgtagaaagcgtggacgtagctgttaacctcggcatcgacgctcgtaaatctgaccagaacgtacgtggtgcaactgtactgccgcacggtactggccgttccgttcgcgtagccgtatttacccaaggtgcaaacgctgaagctgctaaagctgcaggcgcagaactggtaggtatggaagatctggctgaccagatcaagaaaggcgaaatgaactttgacgttgttattgcttctccggatgcaatgcgcgttgttggccagctgggccaggttctgggtccgcgcggcctgatgccaaacccgaaagtgggtactgtaacaccgaacgttgctgaagcggttaaaaacgctaaagctggccaggttcgttaccgtaacgacaaaaacggcatcatccacaccaccatcggtaaagtggactttgacgctgacaaactgaaagaaaacctggaagctctgctggttgcgctgaaaaaagcaaaaccgactcaggcgaaaggcgtgtacatcaagaaagttagcatctccaccaccatgggtgcaggtgttgcagttgaccaggctggcctgagcgcttctgtaaactaatgcctttacgtgggcggtgattttgtctacaatcttacccccacgtataatgcttaatgcagacgtatatccgagatattcgggttgtggcaaggcggcaactgagtgagtcgccaggagcatagctaactatgtgactggtgcgaatgaaggaagccaacgccgtcacaagctgaatagcgacggatagaaaagatttgttcgttggagcctggcctatccaggcctccgtcgaagaccgcaggagtttcgcaagaaacttaatcccctgcgtagacggtgacagaacgctaagattattcttttatattctggcttgtttctgctcaccgtaattaagacgctctctccgtttggaggagtgaagtgagttccagagattttctctggcaaacatccaggagcaaagctaatggctttaaatcttcaagacaaacaagcgattgttgctgaagtcagcgaagtagccaaaggcgcgctgtctgcagtagttgcggattcccgtggcgtaactgtagataaaatgactgaactgcgtaaagcaggtcgcgaagctggcgtatacatgcgtgttgttcgtaacaccctgctgcgccgtgctgttgaaggtactccgttcgagtgcctgaaagacgcgtttgttggtccgaccctgattgcatactctatggaacacccgggcgctgctgctcgtctgttcaaagagttcgcgaaagcgaatgcaaaatttgaggtcaaagccgctgcctttgaaggtgagctgatcccggcgtctcagatcgaccgcctggcaactctgccgacctacgaagaagcaattgcacgcctgatggcaaccatgaaagaagctagcgctggcaaactggttcgtactctggctgctgtacgcgatgcgaaagaagctgcttaatcgcagttatctttttaacgcattcgcttacgtataaacttattctgatattcaggaacaatttaaatgtctatcactaaagatcaaatcattgaagcagttgcagctatgtctgtaatggacgttgtagaactgatctctgcaatggaagaaaaattcggtgtttccgctgctgctgctgtagctgtagctgctggcccggttgaagctgctgaagaaaaaactgaattcgacgtaattctgaaagctgctggcgctaacaaagttgctgttatcaaagcagtacgtggcgcaactggcctgggtctgaaagaagctaaagacctggtagaatctgcaccggctgctctgaaagaaggcgtgagcaaagacgacgcagaagcactgaaaaaagctctggaagaagctggcgctgaagttgaagttaaataagccaacccttccggttgcagcctgagaaatcaggctgatggctggtgactttttagtcaccagcctttttgcgctgtaaggcgccagtagcgtttcacactgtttgactactgctgtgcctttcaatgcttgtttctatcgacgacttaatatactgcgacaggacgtccgttctgtgtaaatcgcaatgaaatggtttaagcgtgatagcaacaggcattgcggaaagtgttccattttccggtcaacaaaatagtgttgcacaaactgtccgctcaatggacagatgggtcgacttgtcagcgagctgaggaaccctatggtttactcctataccgagaaaaaacgtattcgtaaggattttggtaaacgtccacaagttctggatgtaccttatctcctttctatccagcttgacagctttcagaaatttatcgagcaagatcctgaagggcagtatggtctggaagctgctttccgttccgtattcccgattcagagctacagcggtaattccgagctgcaatacgtcagctaccgccttggcgaaccggtgtttgacgtccaggaatgtcaaatccgtggcgtgacctattccgcaccgctgcgcgttaaactgcgtctggtgatctatgagcgcgaagcgccggaaggcaccgtaaaagacattaaagaacaagaagtctacatgggcgaaattccgctcatgacagacaacggtacctttgttatcaacggtactgagcgtgttatcgtttcccagctgcaccgtagtccgggcgtcttctttgactccgacaaaggtaaaacccactctagcggtaaagtgctgtataacgcgcgtatcatcccttaccgtggttcctggctggacttcgaattcgatccgaaggacaacctgttcgtacgtatcgaccgtcgccgtaaactgcctgcgaccatcattctgcgcgccctgaactacaccacagagcagatcctcgacctgttctttgaaaaagttatctttgaaatccgtgataacaagctgcagatggaactggtgccggaacgcctgcgtggtgaaaccgcatcttttgacatcgaagctaacggtaaagtgtacgtagaaaaaggccgccgtatcactgcgcgccacattcgccagctggaaaaagacgacgtcaaactgatcgaagtcccggttgagtacatcgcaggtaaagtggttgctaaagactatattgatgagtctaccggcgagctgatctgcgcagcgaacatggagctgagcctggatctgctggctaagctgagccagtctggtcacaagcgtatcgaaacgctgttcaccaacgatctggatcacggcccatatatctctgaaaccttacgtgtcgacccaactaacgaccgtctgagcgcactggtagaaatctaccgcatgatgcgccctggcgagccgccgactcgtgaagcagctgaaagcctgttcgagaacctgttcttctccgaagaccgttatgacttgtctgcggttggtcgtatgaagttcaaccgttctctgctgcgcgaagaaatcgaaggttccggtatcctgagcaaagacgacatcattgatgttatgaaaaagctcatcgatatccgtaacggtaaaggcgaagtcgatgatatcgaccacctcggcaaccgtcgtatccgttccgttggcgaaatggcggaaaaccagttccgcgttggcctggtacgtgtagagcgtgcggtgaaagagcgtctgtctctgggcgatctggataccctgatgccacaggatatgatcaacgccaagccgatttccgcagcagtgaaagagttcttcggttccagccagctgtctcagtttatggaccagaacaacccgctgtctgagattacgcacaaacgtcgtatctccgcactcggcccaggcggtctgacccgtgaacgtgcaggcttcgaagttcgagacgtacacccgactcactacggtcgcgtatgtccaatcgaaacccctgaaggtccgaacatcggtctgatcaactctctgtccgtgtacgcacagactaacgaatacggcttccttgagactccgtatcgtaaagtgaccgacggtgttgtaactgacgaaattcactacctgtctgctatcgaagaaggcaactacgttatcgcccaggcgaactccaacttggatgaagaaggccacttcgtagaagacctggtaacttgccgtagcaaaggcgaatccagcttgttcagccgcgaccaggttgactacatggacgtatccacccagcaggtggtatccgtcggtgcgtccctgatcccgttcctggaacacgatgacgccaaccgtgcattgatgggtgcgaacatgcaacgtcaggccgttccgactctgcgcgctgataagccgctggttggtactggtatggaacgtgctgttgccgttgactccggtgtaactgcggtagctaaacgtggtggtgtcgttcagtacgtggatgcttcccgtatcgttatcaaagttaacgaagacgagatgtatccgggtgaagcaggtatcgacatctacaacctgaccaaatacacccgttctaaccagaacacctgtatcaaccagatgccgtgtgtgtctctgggtgaaccggttgaacgtggcgacgtgctggcagacggtccgtccaccgacctcggtgaactggcgcttggtcagaacatgcgcgtagcgttcatgccgtggaatggttacaacttcgaagactccatcctcgtatccgagcgtgttgttcaggaagaccgtttcaccaccatccacattcaggaactggcgtgtgtgtcccgtgacaccaagctgggtccggaagagatcaccgctgacatcccgaacgtgggtgaagctgcgctctccaaactggatgaatccggtatcgtttacattggtgcggaagtgaccggtggcgacattctggttggtaaggtaacgccgaaaggtgaaactcagctgaccccagaagaaaaactgctgcgtgcgatcttcggtgagaaagcctctgacgttaaagactcttctctgcgcgtaccaaacggtgtatccggtacggttatcgacgttcaggtctttactcgcgatggcgtagaaaaagacaaacgtgcgctggaaatcgaagaaatgcagctcaaacaggcgaagaaagacctgtctgaagaactgcagatcctcgaagcgggtctgttcagccgtatccgtgctgtgctggtagccggtggcgttgaagctgagaagctcgacaaactgccgcgcgatcgctggctggagctgggcctgacagacgaagagaaacaaaatcagctggaacagctggctgagcagtatgacgaactgaaacacgagttcgagaagaaactcgaagcgaaacgccgcaaaatcacccagggcgacgatctggcaccgggcgtgctgaagattgttaaggtatatctggcggttaaacgccgtatccagcctggtgacaagatggcaggtcgtcacggtaacaagggtgtaatttctaagatcaacccgatcgaagatatgccttacgatgaaaacggtacgccggtagacatcgtactgaacccgctgggcgtaccgtctcgtatgaacatcggtcagatcctcgaaacccacctgggtatggctgcgaaaggtatcggcgacaagatcaacgccatgctgaaacagcagcaagaagtcgcgaaactgcgcgaattcatccagcgtgcgtacgatctgggcgctgacgttcgtcagaaagttgacctgagtaccttcagcgatgaagaagttatgcgtctggctgaaaacctgcgcaaaggtatgccaatcgcaacgccggtgttcgacggtgcgaaagaagcagaaattaaagagctgctgaaacttggcgacctgccgacttccggtcagatccgcctgtacgatggtcgcactggtgaacagttcgagcgtccggtaaccgttggttacatgtacatgctgaaactgaaccacctggtcgacgacaagatgcacgcgcgttccaccggttcttacagcctggttactcagcagccgctgggtggtaaggcacagttcggtggtcagcgtttcggggagatggaagtgtgggcgctggaagcatacggcgcagcatacaccctgcaggaaatgctcaccgttaagtctgatgacgtgaacggtcgtaccaagatgtataaaaacatcgtggacggcaaccatcagatggagccgggcatgccagaatccttcaacgtattgttgaaagagattcgtagcctgggtatcaacatcgaactggaagacgagtaattctcgctcaaacaggtcactgctgtcgggttaaaacccggcagcggattgtgctaactccgacgggagcaaatccgtgaaagatttattaaagtttctgaaagcgcagactaaaaccgaagagtttgatgcgatcaaaattgctctggctagcccagacatgatccgtagttggtctttcggtgaagttaaaaagccggaaaccatcaactaccgtacgttcaaaccagaacgtgacggccttttctgcgcccgtatctttgggccggtaaaagattacgagtgcctgtgcggtaagtacaagcgcctgaaacaccgtggcgtcatctgtgagaagtgcggcgttgaagtgacccagactaaagtacgccgtgagcgtatgggccacatcgaactggcttccccgactgcgcacatctggttcctgaaaagcctgccgtcccgtatcggtctgctgctcgatatgccgctgcgcgatatcgaacgcgtactgtactttgaatcctatgtggttatcgaaggcggtatgaccaacctggaacgtcagcagatcctgactgaagagcagtatctggacgcgctggaagagttcggtgacgaattcgacgcgaagatgggggcggaagcaatccaggctctgctgaagagcatggatctggagcaagagtgcgaacagctgcgtgaagagctgaacgaaaccaactccgaaaccaagcgtaaaaagctgaccaagcgtatcaaactgctggaagcgttcgttcagtctggtaacaaaccagagtggatgatcctgaccgttctgccggtactgccgccagatctgcgtccgctggttccgctggatggtggtcgtttcgcgacttctgacctgaacgatctgtatcgtcgcgtcattaaccgtaacaaccgtctgaaacgtctgctggatctggctgcgccggacatcatcgtacgtaacgaaaaacgtatgctgcaggaagcggtagacgccctgctggataacggtcgtcgcggtcgtgcgatcaccggttctaacaagcgtcctctgaaatctttggccgacatgatcaaaggtaaacagggtcgtttccgtcagaacctgctcggtaagcgtgttgactactccggtcgttctgtaatcaccgtaggtccatacctgcgtctgcatcagtgcggtctgccgaagaaaatggcactggagctgttcaaaccgttcatctacggcaagctggaactgcgtggtcttgctaccaccattaaagctgcgaagaaaatggttgagcgcgaagaagctgtcgtttgggatatcctggacgaagttatccgcgaacacccggtactgctgaaccgtgcaccgactctgcaccgtctgggtatccaggcatttgaaccggtactgatcgaaggtaaagctatccagctgcacccgctggtttgtgcggcatataacgccgacttcgatggtgaccagatggctgttcacgtaccgctgacgctggaagcccagctggaagcgcgtgcgctgatgatgtctaccaacaacatcctgtccccggcgaacggcgaaccaatcatcgttccgtctcaggacgttgtactgggtctgtactacatgacccgtgactgtgttaacgccaaaggcgaaggcatggtgctgactggcccgaaagaagcagaacgtctgtatcgctctggtctggcttctctgcatgcgcgcgttaaagtgcgtatcaccgagtatgaaaaagatgctaacggtgaattagtagcgaaaaccagcctgaaagacacgactgttggccgtgccattctgtggatgattgtaccgaaaggtctgccttactccatcgtcaaccaggcgctgggtaaaaaagcaatctccaaaatgctgaacacctgctaccgcattctcggtctgaaaccgaccgttatttttgcggaccagatcatgtacaccggcttcgcctatgcagcgcgttctggtgcatctgttggtatcgatgacatggtcatcccggagaagaaacacgaaatcatctccgaggcagaagcagaagttgctgaaattcaggagcagttccagtctggtctggtaactgcgggcgaacgctacaacaaagttatcgatatctgggctgcggcgaacgatcgtgtatccaaagcgatgatggataacctgcaaactgaaaccgtgattaaccgtgacggtcaggaagagaagcaggtttccttcaacagcatctacatgatggccgactccggtgcgcgtggttctgcggcacagattcgtcagcttgctggtatgcgtggtctgatggcgaagccggatggctccatcatcgaaacgccaatcaccgcgaacttccgtgaaggtctgaacgtactccagtacttcatctccacccacggtgctcgtaaaggtctggcggataccgcactgaaaactgcgaactccggttacctgactcgtcgtctggttgacgtggcgcaggacctggtggttaccgaagacgattgtggtacccatgaaggtatcatgatgactccggttatcgagggtggtgacgttaaagagccgctgcgcgatcgcgtactgggtcgtgtaactgctgaagacgttctgaagccgggtactgctgatatcctcgttccgcgcaacacgctgctgcacgaacagtggtgtgacctgctggaagagaactctgtcgacgcggttaaagtacgttctgttgtatcttgtgacaccgactttggtgtatgtgcgcactgctacggtcgtgacctggcgcgtggccacatcatcaacaagggtgaagcaatcggtgttatcgcggcacagtccatcggtgaaccgggtacacagctgaccatgcgtacgttccacatcggtggtgcggcatctcgtgcggctgctgaatccagcatccaagtgaaaaacaaaggtagcatcaagctcagcaacgtgaagagcgttgtgaactccagcggtaaactggttatcacttcccgtaatactgaactgaaactgatcgacgaattcggtcgtactaaagaaagctacaaagtaccttacggtgcggtactggcgaaaggcgatggcgaacaggttgctggcggcgaaaccgttgcaaactgggacccgcacaccatgccggttatcaccgaagtaagcggttttgtacgctttactgacatgatcgacggccagaccattacgcgtcagaccgacgaactgaccggtctgtctagcctggtggttctggattccgcagaacgtaccgcaggtggtaaagatctgcgtccggcactgaaaatcgttgatgctcagggtaacgacgttctgatcccaggtaccgatatgccagcgcagtacttcctgccgggtaaagcgattgttcagctggaagatggcgtacagatcagctctggtgacaccctggcgcgtattccgcaggaatccggcggtaccaaggacatcaccggtggtctgccgcgcgttgcggacctgttcgaagcacgtcgtccgaaagagccggcaatcctggctgaaatcagcggtatcgtttccttcggtaaagaaaccaaaggtaaacgtcgtctggttatcaccccggtagacggtagcgatccgtacgaagagatgattccgaaatggcgtcagctcaacgtgttcgaaggtgaacgtgtagaacgtggtgacgtaatttccgacggtccggaagcgccgcacgacattctgcgtctgcgtggtgttcatgctgttactcgttacatcgttaacgaagtacaggacgtataccgtctgcagggcgttaagattaacgataaacacatcgaagttatcgttcgtcagatgctgcgtaaagctaccatcgttaacgcgggtagctccgacttcctggaaggcgaacaggttgaatactctcgcgtcaagatcgcaaaccgcgaactggaagcgaacggcaaagtgggtgcaacttactcccgcgatctgctgggtatcaccaaagcgtctctggcaaccgagtccttcatctccgcggcaagcttccaggagaccactcgcgtgctgaccgaagcagccgttgcgggcaaacgcgacgaactgcgcggcctgaaagagaacgttatcgtgggtcgtctgatcccggcaggtaccggttacgcgtaccaccaggatcgtatgcgtcgccgtgctgcgggtgaagctccggctgcaccgcaggtgactgcagaagacgcatctgccagcctggcagaactgctgaacgcaggtctgggcggttctgataacgagtaatcgttaatccgcaaataacgtaaaaacccgcttcggcgggtttttttatggggggagtttagggaaagagcatttgtcagaatatttaaggaatttctgaatactcataatcaatgtagagatgactaatatcctgaaactgactgaactaattgagtcaaactcggcaaggattcgatactattcctgtgtaactttcttaaggaacgagaatgaaacaggaagtggaaaagtggcgaccttttggacatccggatggtgatattcgtgatttaagttttcttgatgctcatcaggctgtctacgttcagcatcatgagggcaaagagcctttagagtatcgcttttgggttacctactctcttcactgcttcacaaaagattatgaacatcagacgaacgaagaaaaacaaagcttaatgtaccacgcgcctaaagaatctcgtcccttctgccagcaccgttataacttagcgcgcacacacttaaaaagaactattttggcgctgccagaaagcaacgttattcatgccgggtatggtagctatgccgtgattgaggtggacttagacggaggagataaggcattttactttgttgcgttcagggctttcagggaaaagaaaaaactccgtttgcatgtaactagcgcttatcccatttctgaaaaacagaaaggtaaaagtgtgaaatttttcaccattgcctacaacttattgagaaataagcagcttcctcagcccagtaaataacaaaacccaccttaaggtgggtttcgccagagaattatctctggtattcagaacgccattaccggactttgccttgaccttgcgataatcgcaggttgcgggatgtctgaatttcttcagtctgctgcatcctggaagatgagaacatgtgttcttattttcgtctctatcatagttgagtatttactctcttacaatcagatctctttcattgctcaacaggcgatggcttcagactttgcattacggaatttttaagaaaggcagggcgaaacgaggaagaagcttttcgccctggacaacattcctgctgacggcactaccataaaaaaacacaacgctttcaacaaccttgcgtttttcatcttccgtagcggctcggaataaatttacgttcttacattccgtctcatagtctttggctggcgcgtcccagatagctgtcccagtctttccataccggctgcaaaccctgagcggttaacgcggcagcaaccgcttccggtctgcgatcgtcgtgcggactgaactgttccaactcggggtgattatcggcatagccacctggctgcgttttgctgaaggcgctgacgttattgatcgccagcggaataacgcgatcgcgaaaccacggactttcccgcgtggagagactcagttcaatctccggtgcaagcagtcggaaggcgcagatggtttgcactaactggcgttcatccataatgctcgcaggctcaatgccgccagtacacgggcgcaggcgcggaaaggagacagagtaacggctttgccagtaatgctgttgcagccatagcaaatgttcggcaaccatatagctgtcaacgcgccagttgtcggaaaggccaattagcgcgccgaggcctatcttatcaatccccgcacgccccagccgatccggcgtttccagccgccagaagaagtcctgttttttgcctttcagatgatggcgggcataagtcgcctcgtgatatgtctcctgataaaccatcacgccatccagaccaagttgctttaactcggcgtattccgtctccgccagcggttgcacttccatctgtagactagagaactgttcacgaagggcagggagatgacgacgaaagtaatccatccccactttcgcctgatgttcaccagtgactaacagcagatgttcaaagcccatctcccgtatagcggcactttccctggcaatatccgcttcatccagcgttttgcgcttgatgcgattactcatggaaaatccacagtacgtgcagtcgttagcgcaaagattggaaagataaagcgggacgtagaaactaactgtgttgccaaatcgctgacgggtcagacgctgcgcccgttgggccagttgttccagatagccactggcggcagggcttaacagcgccatcatgtcgtcgcgggtgagttggctggcatttagcgcccgctctacgtcagcagccgttttgccgttgatacgcaggcggatgtcgtcccagtccagttgtcgccagcgatcgctgaaggttttcatgcgcttgcctccagaaatccggtcagcgggctggtggcatgagcaaaataactgcggctgcccggtccggactgacgtgccagtaggcctgcttctaccgccagacgaaatgccttcgccatgttgacgggatcgtccgcgacggcaatcgccgtattcactaacaccgcgtcggcccccatttccagcgcctgcgcggcatggctgggaacgccgatgccagcatcgacaaccaccggcactgtggcctgctggataataatctccagcatggcgcgggtttccagtccctgattgctgccaatcggcgcgccgagcggcatcaccgctgcacagccgacttcttccagacgtttacacaataccggatcggccccgcagtaaggcagcacgacaaatccctgttgtaccagcgtttcggcggctttcagggtttcgatgggatcgggcaacagccagcgggcgtcagggtgaatctctaattttaaccagtttgtgcctaacgcttcacgagccagatgggcggcgaaaatggcttcttccgctgttttcgccccggatgtatttggcagcagggtcacacccgccgcgataagcggttcgaggatagcgtcgttgtgctggcgcaagtcgacacgtttcatcgccagtgtcaccagctggctgccggaagcgcggatcgcctccaccatcagttgactagaagcgaatttccctgtgccggtaaacagatgactatcaaacgttttgtccgcaatacgtaacatttcaaccccctgcaataacctgaaaaagcaggatctggtcgccatcctgcacgatatgttgcgcccactgctcacgcgggacgatttgctgattaatcgccagagccgcgcccgcttgtcgttggtcgagttgctccagtagttcgtgaacagtttgcccggcggcgcactgcatcgcttgatcgttaaacaggatctgcattgcttcctccgcataccgggcaaccactggcgcggcgcaacgccaggctgcgccactggctgcttttaccgtcgaacagtcggagttctcccgcaggtgtctctataccgcttaataacttaatggcttccagtgcctgcaaagtgcccataaccccgaccaccgggccaaccacgcccgccgtgcggcagttgcgttctggctcctggttatctggccacaggcagcggtaacacccctgctcccagggcggcgtcagtaccatcaactgaccgccaaatccgaccgcgctggcggtgataagcggcgtgttgagtgccacgcaggcggcattaatctcctggcgagtcgccatattgtcggtacagtcgagcaccacatcggcccgtgcaaccgcatcttttaacgcctcacccgttaaccgttgttgtaatgctgtcagttgaatgtcgggattcaactgtgtcagtcgctgttggctgacctggcttttcgggcgatcgatatcttcagtggtaaagaggatttgtcgttgcagattgcttaaatgcacatcgtcgtcatctgccagtaccagcgtcccgacgccagcgcccgccaggtacagcgcagcaggtgtacccagcccgcccagaccgataatcagcacctggctgtcgagcagtttttgctgcccgtccagagcgatatcgtcgagcaggatttggcggctataacgcataaagtcacggtcattcatcgccaactcctgcaatttccagcaactgtgccgttgccaaacgccagtctgcggcttgagtaatggcgctgacgacggcgatactgccgacacccgttgctatcaccgcaggcgcgcgtgccagactgataccgccaatcgccacggtgggataatccgccagtcgctcaacatgccgtgccagctgttccagcccctgcggtgcagaaggcatctgtttggtttgcgtcgggaacacatgtcccagcgcgatataagaggggcgtgctgccagcgcgacgtcgatttccatatcgtcatgtgtgctaacgcccagccgcaggcctgccgcgcggatggcattgagatcggtggcttgcaaatcttcctgccccaaatggacgccatacgcctgatgcttgatcgccagccgccagtaatcgttgataaacaatcgcgcgttatagcggcggcccagcgcaattgccgccacgacatcggcttccacctcttcatcgcgccgatctttgatgcgtagctggagagtacgtacgcctgcatccaacagacgttcgatccactgtacgctgtccaccaccgggtacagtccactacgaaaaggtacaggaggaaaatcaggctgatacatcacgcttcctccttacgcaggtagatttctccgcctctggcacggaagttctcgctcatatccgccattcccatttcaatagtttgcgtggcggcgtaatcacgcacttcctggctgattttcatgctgcagaatttcggcccacacatggagcaaaaatgggcgactttaccactctcttgcggcagggtttcatcgtgataagcgcgggcggtaaacgggtcgagggccagattaaactggtcttcccagcgaaattcgaagcgggctttgctcatggcgttatcgcgaatttgcgcgcccggatgccctttcgccaggtcagcggcgtgggcagcaatcttataggtgataagcccctgcttaacatcttctttattgggcagacccagatgctcttttggcgttacgtaacagagcatcgcgcagccaaaccagccaatcatcgccgcaccaatcccgctcgtgaagtggtcatagcccggcgcaatatcggtagttagcggccccagagtgtaaaacggcgcttcgtggcagtgctctaactcctcggtcatattgcggcggatcatctgcatcggcacgtggcctgggccttcaatcatcacctgcacgtcatattcccaggcaattttggtcagttcgcccagcgtatgcagctcggcaaactgcgcttcatcgttggcgtcctgaatagaaccggggcgcagaccgtcgcccaggctcaggctaacgtcataagcggcacagatttcacaaatttcgcggaagtgttgatagaggaaattttcctgatgatgggagaggcaccatttcgccataatgctaccgccgcgagagacgataccggtcaggcgtttcgcggtcatcggcacatagcgcagcagtacgcccgcatggatagtgaagtaatccacaccttgctcggcctgttccagcagcgtgtcgcggaacgcttcccaggtaagatcttcggcgatcccgttaaccttctccagcgcctggtagatcggcactgtaccgatcggcaccgggctgttacgcaaaatccactcgcgggtttcgtgaatatagcgaccggtggagagatccatcaccgtatccgctccccagcgcgtggaccataccagcttttccacttcttcttcgatggaagaggtgaccgcgctgttgccgatattggcgttaacttttaccaggaaattgcgaccaataatcatcggctcgctttccggatgattaatgttggccgggataatcgcacgtccggcagcaacttcatcacggacaaattccgcagtgatattttccggcagatgtgcgccaaagctcattcccggatgctggtggcgtaaaacctcgctacggatgcgctcgcggcccatattctcgcggatggcgatgaattccatttccggcgtgatgatgccctggcgggcgtagtgcagttgggtgacacggcgtcctgctttggcgcgttttggtgttagtacgccgctaaaacgcagttcgtcgaggccatcatctgccagccgcgctttagtgtaatcggaactgcgcacggtaagttcttcggtatcgccgcgcgcatcgatccacggctggcgtagttttgccagcccttgctgcacgttaatggcaatctgcggatcaccatacgggccggaggtgtcgtagaccggaatcgcttcgttttcttcgtactgcggctgttctttgctaccgccaattagcgtcgggctaagctggatctcacgcatcggcacgcgcacgccggggtgtgtgccagtgatataaatgcgtttactgttgggaaaggcggtgccttccagggtgtcgataaaatgttgggcccgggcgcgttgttcgcggcgggtcagttttgttgcagacatagctcattccaaaaagttaaggacgtggcttgtcagacgacggatgaagcaagagacgatcgccgcaggggcgatgcgatagcagattaactcttgttcccttcgcaggtattagcctgatcaggttccgcggatcccgaataaacggtctcagccagttaaggcactccgacaagaaattagccccgcaaatggggcattgaatgtaaattacgcgttaacagcgcagaactcaagcaggatgtttgacgcgggcggcgtcaagcaccagcagaatcagcttatcttccagcacaaagcgcgcttccagcgcctcgccgatgtcagataaaacctgttgaaactcaaggtaattatcatgatcgatggcggtttccagactggaatcgtagtaatccataatctgttgagtattggcttcgagttgcggccaaatcttcgcggcgcgcgcgagttgcccgttgccttccagcttatgaagaatgcgctcataaatactgaaatgtccggcagacaagtaatcgaccaggctctgacaaaaatcatcaagggctttttcgtttagcctcatgtagctttctttgccaggcttaatgccaaccagattgtagtaagccacgagcagatgcttacgtacatgtagccagcgatcaaccagtttgttacttcctctgacgcgctccgtcaggttatcgagctggttaagcatgattgactccgcaagtttgtattcaaaaactgctcagtgagaaatgtaaaaaccatgttaaacatgccagtgatgcaaaggtagtgcaagagctatggatcgtataattgaaaaattagatcacggctggtgggtcgtcagccatgaacaaaaattatggttgccgaagggagaattgccatatggcgaagcggcaaatttcgatcttgtgggtcagcgcgcactacaaatcggcgaatggcagggggaacctgtttggttagtacaacagcagcggcgtcacgatatggggagcgtacgtcaggtcattgatctcgatgttgggctgtttcaactggccggacgaggcgtacaactggcggagttttaccgaagccataaatactgtggttactgcgggcatgaaatgtatccgagcaaaaccgaatgggcgatgctgtgcagccattgccgtgagcgttactacccgcaaatcgccccctgcattattgttgccatccgtcgcgatgatagcatcctcctcgcccagcatacccgccatcgtaacggtgtccatacagtacttgccggattcgtcgaagtgggcgaaaccctcgagcaggcagtcgcgcgggaagtgatggaagagagcggaattaaagttaaaaacttgcgttacgtgacttctcagccgtggccgtttcctcagtctttaatgaccgcgtttatggcggaatatgacagcggcgacatcgtgatcgacccgaaagaattgctcgaggcgaactggtatcgctatgacgatttgccgttactcccgccgcccggcaccgtagcgcgccgtctgatagaagatacggtggcgatgtgtcgggcagagtatgagtgatgatacactgaccgcctgacgcactaaggaacagccaaaatgaccgaacttaaaaacgatcgttatctgcgggcgctgctgcgccagcccgttgatgtcactccagtatggatgatgcgccaggcgggtcgctatctaccggaatataaagccacgcgcgcccaggcaggcgattttatgagcctgtgcaaaaacgccgagctggcgtgcgaagtgactttgcaaccgctgcgtcgctacccgctggatgcggcgatcctcttttccgatatcctcaccgtgccggacgcgatggggttagggctctattttgaagccggagaaggtccgcgttttaccagcccagtcacctgcaaagctgacgtcgataaactgccaattccggacccggaagatgaactgggttacgtgatgaacgcggtgcgtaccattcgtcgcgaactgaaaggcgaagtgccgctgattggtttttccggcagcccgtggacgctggcgacctacatggtggaaggcggcagcagcaaagccttcaccgtgatcaaaaaaatgatgtatgccgatccgcaggcgctgcacgctctgctcgataaactggcgaaaagcgtcactttgtatctgaatgcgcagattaaagccggtgctcaggcagtgatgattttcgacacctggggcggcgtgcttaccgggcgcgattatcaacagttcagcctctattacatgcataaaattgttgatggtttactgcgtgaaaacgacggtcgccgcgtaccggtcacgctgtttaccaaaggcggcggacagtggctggaagccatggcagaaaccggttgcgatgcgctgggcctcgactggacaacggacatcgccgatgcgcgccgccgtgtgggcaataaagtcgcgttgcagggtaatatggatccgagcatgctgtacgcgccgcctgcccgcattgaagaagaagtagcgactatacttgcaggtttcggtcacggcgaaggtcatgtctttaaccttggtcacggcattcatcaggatgtgccgccagaacatgctggcgtgttcgtggaggcagtgcatcgactgtctgaacagtatcaccgctaaggagtgattatggatctcgcgagtttacgcgctcaacaaatcgaactggcttcttctgtgatccgcgaggatcgactcgataaagatccaccggatctgatcgccggagccgatgtcgggtttgagcagggcggagaagtgacgcgagcggcgatggtgctgctgaaatatcccagccttgagctggtcgagtataaagttgcccgcatcgccaccaccatgccttacattccaggttttctttccttccgcgaatatcctgcgctgctggcagcgtgggagatgctgagccaaaagccggatttagtgtttgtcgatggtcatgggatcagccatcctcgccgtcttggcgtcgccagccattttggcttattggtggatgtgccgaccattggcgtggcgaaaaaacggctctgcggtaaattcgaaccgctctccagcgaaccgggcgcgctggccccactgatggataaaggcgagcagctggcctgggtctggcgcagcaaagcgcgctgtaacccgttgtttatcgctaccggccatcgggtcagcgtggacagcgcgctggcgtgggtacaacgctgcatgaaaggctatcgtctgccggagccaacgcgctgggcggacgcggtggccagcgaacgtccggcgttcgtgcgctatacagcaaatcagccctaattcaggtaaactgcggataatttccgtatttgagaactcaacatgttacaaaacccaattcatctgcgtctggagcgcctggaaagctggcagcatgtcactttcatggcttgcttatgcgaacgcatgtaccccaattacgccatgttctgccagcaaaccggttttggtgatgggcaaatttaccgtcgcattctcgatctcatctgggaaacgctgaccgttaaagacgcaaaagtaaatttcgacagccaactggagaaatttgaagaagcgattcctagtgccgacgatttcgatctgtacggcgtttatccggcaatcgatgcctgcgtggcgttaagtgaactggtccatagccgtttgagtggtgaaacgctcgaacacgcggtggaagtgagtaagacctccatcacgaccgttgcgatgctggaaatgactcaggctggtcgcgaaatgagcgatgaagagcttaaagaaaacccagctgtagagcaagaatgggacattcagtgggaaatattccgacttttagctgagtgcgaagaacgcgatatcgagctgataaaaggccttagggcagacctgcgtgaggcgggtgagagcaatattggtataatttttcagcaataagaccagaaaacgtgatttaacgcctgatttgtcgtacctggagtcttccctttcgccccccgtctggtctacatttggggggcgaaaaaaagtggctatcggtgcgtgtatgcaggagagtgctattctggcatttccgtcgcactcgatgcttagcaagcgataaacacattgtaaggataacttatgaacaagactcaactgattgatgtaattgcagagaaagcagaactgtccaaaacccaggctaaagctgctctggagtccactctggctgcaattactgagtctctgaaagaaggcgatgctgtacaactggttggtttcggtaccttcaaagtgaaccaccgcgctgagcgtactggccgcaacccgcagaccggtaaagaaatcaaaattgccgcagctaacgtaccggcatttgtttctggcaaggcactgaaagacgcagttaagtaagattgcgtggcagtgaacagttttaacgaaggggtggttagtccccttttgtctttctggcgtcgaagtttgatgctggctggcgctctgcttctcactgcctgtagtcataactctagtcttcctccctttaccgccagtggatttgctgaagaccagggcgcggtacgcatctggcgaaaagacagcggcgataatgtgcatctgcttgccgtgtttagcccgtggcgcagtggcgataccacgacgcgagagtatcgctggcagggcgataacctcacgctcatcaatatcaatgtttacagcaaaccgccggtgaatattcgcgcgcgttttgacgatcgcggtgatctgagctttatgcaacgtgaatccgatggggaaaagcagcagctttctaacgaccaaatcgatttataccgttatcgtgctgatcagatccgccagattagcgatgccttacgtcaggggagagtcgtgctgcgccaggggcgctggcatgcgatggaacagaccgtgaccacctgcgaagggcaaaccattaaacctgatttagatagccaggcgatagcgcatatcgagcgccgccagagccgctcttctgttgatgtcagcgtggcatggctggaagcgcccgaaggtagccaattactgttagtggcaaactctgatttctgtcgctggcaacccaacgagaaaacgttctgatttaccagtggcccatacccatatgaccgccaccaccgcagccgccgtagcccatgcccattccggctccgcgcggaatacccgcttcagccatcgcgatatctcgtttcacccgtaactcatctaagctctgacgcaaattctccatctctttggcgaccgcgttaattttgctgctatccggtgggttcgcggctaacagggcattgtattcataacgcttcgtcaccagttgctgttgcagtgcgctgctttgagcgtaaaagtcattatggattttctgccacgctgtctgttgttcgctggtcaaaggcgcggcattttgctgccacataccgtgtccgccgtgagcaaatgcagatgtgcttcccatcgccattgcactaagcgccatcattaccagggcaattttcgtgttccgtttcatggttaatcctccagtggttgtcttacttcgggtattgcatcttccgtgccaacgatgaaacgctgatatgacgggtaatctggcatgataaacgagtaaaaatgactcgcctgctgcgggtagcgagtcatttttactcattgaaacttaagcctttgtgttacagcgcagggtaagcgctgataaaagatggcatgatttctgctgtcagaaagggatgagcaggcaaagaagaagatgcgttttatgcaacgttctaaagactccttagctaaatggttaagcgcgatcctccccgtggtcattgttgggctggtgggattgtttgcggtaactgtgattcgtgattatgggcgggcaagcgaggcagaccgccaggcattactggaaaaaggtaatgtgcttatccgcgctctggagagcggaagccgcgtagggatggggatgcgaatgcaccatgtacagcaacaggcgcttctggaagagatggcgggacagccgggagtgttgtggttcgcagtcaccgatgcgcagggcatcattattcttcatagcgaccccgataaggtcgggcgtgcgctctatagcccggatgaaatgcagaaattaaagccagaggaaaactcccgctggcggctgcttgggaaaacggaaactacgcctgcacttgaggtctatcgtttgttccagccaatgagtgcgccctggcggcatggaatgcacaatatgccgcgctgtaacggcaaagctgtgccacaagtagatgcacaacaggctatttttatcgccgttgatgccagtgatctggttgcaacccagagtggggaaaagcgcaataccctgattatcctcttcgccctggcgacggtcttgctggcaagcgtattgagtttcttctggtatcgccgctatctgcgcagccgccagcttctacaagatgaaatgaagcgcaaagagaagctggtggcgctggggcatcttgcggcaggcgttgcccacgaaatccgtaacccactttccagcattaaaggactggcgaaatactttgccgagcgcgcgcctgcagggggagaagcgcatcaactggcgcaggtgatggcgaaagaggccgaccgtttaaaccgcgtggtaagcgagttgctggaactggttaagccaacgcatctggctttgcaggcggtggatctcaacacgctgattaaccacagtttacagctggtaagtcaggatgcaaacagccgggagatccagttacgctttaccgccaacgacacattaccggaaattcaggccgacccggacaggctgactcaggtcctgttgaatctctatctcaatgctattcaggcgattggtcagcatggcgtgattagcgtgacggccagcgaaagcggcgcgggcgtgaaaatcagcgttaccgacagcggtaagggaattgcggcagatcagcttgatgccatcttcactccgtacttcaccactaaagccgaaggcaccggattggggctggcggtcgtgcataatattgttgaacaacacggtggtacaattcaggtcgcaagccaggagggaaaaggcagtacgttcaccctctggcttccggtcaatattacgcgtaaggacccacaaggatgacgcacgataatatcgatattctggtggtggatgatgacattagccactgcactattttgcaggctttactgcgcggctggggctataacgtcgcgctggcgaacagcgggcgacaggcgttggagcaggtgcgggaacaggtttttgatcttgtgctttgcgatgtgcgaatggcggagatggacggcatcgccacgctgaaagagatcaaagcgttaaacccggcaattccggtgctgattatgactgcgtactccagcgtcgagacggcggtagaggcactgaaaactggggcgctggattatctcatcaagccgctggatttcgataacctacaggcgacgctggaaaaagcgctcgcgcatacgcacagtattgatgctgaaacacctgcggtgactgccagccagttcggtatggtcggtaaaagcccggcgatgcaacacctgctcagtgaaatcgccctcgtcgcgccaagcgaagccacggtactgatccacggcgattccggcaccggtaaagagctggtcgccagggcgattcacgccagtagcgcacgtagcgaaaaaccgctggtaacgctcaactgtgcggcactcaacgaatccttgctggaatctgaattgttcggtcacgaaaaaggggcgtttactggagccgataaacgccgggaagggcgctttgttgaggcggacggcggcacgctgtttctcgatgaaattggcgatatcagcccgatgatgcaggtgcgtctgctgcgtgcgattcaggagcgcgaagttcagcgtgtcggtagcaaccagattatcagcgttgatgtccggctgattgcggcgacccatcgcgatcttgccgcagaggtgaatgccgggcgttttcgccaggatctctactatcgcctgaatgtggtggcgattgaagtaccaagcctgcggcaacggcgggaagatatccctctgctggctggccattttctgcagcgctttgccgagcgtaatcgcaaggcggtaaaaggttttacgccccaggcgatggatctgttgattcattacgactggccgggaaatattcgtgagctggaaaacgcggtggaacgggcagtggtgctgctgaccggggaatatatttccgaacgcgagctgccgctggcgattgccagtacgccgatcccgctgggacaaagtcaggatattcagccgttggtggaagtggaaaaagaggtgattctggcggcgctggagaaaacgggcggcaacaaaaccgaagccgcccgtcagttagggatcacgcgcaaaacgctattggcaaaactgagccgttaattctgctcgcgttcgatagcgcgccagccgatatctttccggcagaagcagtcgtcccagtggatatcggtcattaaggcataggcgcgtttctgcgcttctgccacggtatgacccagcgcggtgacgcacagtacgcgcccgccgttggtcactacctgctcgtcatccgccagttttgtgcccgcgtggaacactttgccgcctgccacttcttccagcggcaggccgtggatcacgtcaccggtgcggtaatcacccggatatccacccgcagccatcaccacgccgagagaagcgcgttcatcccactcggacgttttctcgtccagtttgctttcacaggccgccaggcagagctcaaccagatcggacttcatgcgcagcataatcggctgggtttccggatcgccaaagcggcagttaaattcaataaccttcggattgccctgtttgtcgatcatcaggcccgcgtagagaaaaccggtgtaggtgttgccttccgccgccatgcctttcacggttggccagataatacgttccatggtgcgctgatgaacgtcatcggttactaccggcgcgggggagtaagcgcccatcccgccggtgtttggtccggtatctttatcgcctacgcgtttgtgatcctggctggtagccatcggcagcacatgctcgccgtccaccatcacgataaagctcgcttcttcgccatcgaggaactcttcgataacgatgcgatgacccgcgtcgccaaaagcgttgcccgccagcatatcgtgaacagccgcttccgcttcttccagcgtcatcgccacgataacgcctttcccggcagccagaccgtccgctttaatgacgattggcgcgcctttctcacgcagatacgccagcgcaggttctacctcggtgaagttctggtattccgccgtagggatcttatggcgggccaggaaatctttggtaaacgctttactgccttccagttgggccgcacctgcggttgggccgaagattttcagcccggcggcgcggaaggtatcgaccacgcctttcaccagcggcgcttccgggccgacgatggtcagatcaatcttttcgttttgtgcgaaatccaacagcgccgggatatcggtcacgccaatagcaacgttttgcagcgcgggttccagtgcagtgcctgcattacccggagcaacaaaaacagtctcaaccagcgggctctgggccgctttccaggccagcgcgtgctcgcgcccgccgttaccaatcactaatactttcatctattgctccattaatggcggaagtggcgcatgtcggtgaagagcatcgcaataccgtgctcgtcggcggcggcaatcacttcgtcatcacggatagaaccgccaggctggattacgcaggtcacgcccgcagcggcggcggcatcaataccgtcgcggaacgggaagaacgcgtcagaagccatgctggaacctttcacttccaggccttcatcggccgctttaataccggcgatttttgcggagtacacgcggctcatctggcccgcgccaatgccgatagtcatattgtttttggcatagacgatagcgttggatttcacaaacttcgccaccttccagcagaacagcgcatcacgcagttcctgttcgctcggctgacgtttggtcaccacgcgcagttcttccgcaccgaccatccccaggtcacgatcctgaaccagcagaccgccgttcacgcgtttgaaatcgaggcccggaacacgctcgccccactgaccgcaggtcagaacgcgtacgttctgtttggcggcggtgattttcagggcttcttcgctggcggacggcgcaataatcacttcgacaaactgacgagaaatgatggcctgtgcggtttccgcatccagctcgcggttaaaggcaatgatgccgccgaatgcggaggttgggtcggttttgtacgcgcgatcgtaagcatcaagaatggaattgccgatagccacgccgcaagggttggcgtgcttcacaatcacacatgccggctcggcgaactctttcacgcactccagcgccgcatcggtatcggcgatgttgttataagagagggctttaccctgaacctgggttgcggtagcaacggaggcttctttcacattctcttctatatagaaggcagcctgctggtggctgttctcgccgtaacgcatatccagcttcttaatgaagttcaggttcagcgtgcgtgggaagcgaccggcggcttctttgctttcaccgtggtaagccggaaccatgctgccgaagtagttggcaatcatgctgtcgtaggcggcagtgtgttcgaaggctttgatggcgaggtcgaaacgggttgcaagcgtcaggcttccttcgttgtcatccatctctttaataatggcgtcatagtcgctgctcttcaccacgattgcgacatctttatggttcttggcggcggagcgcaccatcgttgggccgccgatatcgatgttctcaaccgcatcttccaggctgcaaccttcacgggccacggtctgggcgaacggatacaggttaacaaccaccatatcgataggctggatctgatgttcttccataatggcatcgtcctggccgcgacggcccagaatgccaccatgtactttcggatgcagggtcttcacgcgtccatccatcatctccgggaaaccggtgtaatcggaaacttcggttaccggcagacctttttctgctaacagacgggcagtgccccctgtagacagcagctccacaccgcgtgcggaaagtgcctgggcgaattcgacgataccggctttgtcagaaacactgagcagagcgcggcggactggacgacgttgttgcatggtaaatcccctggatttgactattacagagagcgttagctgaatttttcgcgaaaaactcagctaacgcccctaacggggcatccttatttttcgcccgcattgtaacgaaaacgtttgcgcaacgctcgcgaatttttctctttcaatggtgatcacaattttgactgtggttaccgtgggcaaaatacagaaattacattgatgattgtggataactctgtgcgtaaaaaggtataaagcgggcttttgctggggaatgcagcagtcagtcatttttctgcaatttttctattgcggcctgcggagaactccctataatgcgcctccatcgacacggcggatgtgaatcacttcacacaaacagccggttcggttgaagagaaaaatcctgaaattcagggttgactctgaaagaggaaagcgtaatatacgccacctcgcgacagtgcgctaaagcgcgtcgcaactgctctttaacaatttatcagacaatctgtgtgggcactcgaagatacggattcttaacgtcgcaagacgaaaaatgaataccaagtctcaagagtgaacacgtaattcattacgaagtttaattctttgagcatcaaacttttaaattgaagagtttgatcatggctcagattgaacgctggcggcaggcctaacacatgcaagtcgaacggtaacaggaagaagcttgcttctttgctgacgagtggcggacgggtgagtaatgtctgggaaactgcctgatggagggggataactactggaaacggtagctaataccgcataacgtcgcaagaccaaagagggggaccttcgggcctcttgccatcggatgtgcccagatgggattagctagtaggtggggtaacggctcacctaggcgacgatccctagctggtctgagaggatgaccagccacactggaactgagacacggtccagactcctacgggaggcagcagtggggaatattgcacaatgggcgcaagcctgatgcagccatgccgcgtgtatgaagaaggccttcgggttgtaaagtactttcagcggggaggaagggagtaaagttaatacctttgctcattgacgttacccgcagaagaagcaccggctaactccgtgccagcagccgcggtaatacggagggtgcaagcgttaatcggaattactgggcgtaaagcgcacgcaggcggtttgttaagtcagatgtgaaatccccgggctcaacctgggaactgcatctgatactggcaagcttgagtctcgtagaggggggtagaattccaggtgtagcggtgaaatgcgtagagatctggaggaataccggtggcgaaggcggccccctggacgaagactgacgctcaggtgcgaaagcgtggggagcaaacaggattagataccctggtagtccacgccgtaaacgatgtcgacttggaggttgtgcccttgaggcgtggcttccggagctaacgcgttaagtcgaccgcctggggagtacggccgcaaggttaaaactcaaatgaattgacgggggcccgcacaagcggtggagcatgtggtttaattcgatgcaacgcgaagaaccttacctggtcttgacatccacggaagttttcagagatgagaatgtgccttcgggaaccgtgagacaggtgctgcatggctgtcgtcagctcgtgttgtgaaatgttgggttaagtcccgcaacgagcgcaacccttatcctttgttgccagcggtccggccgggaactcaaaggagactgccagtgataaactggaggaaggtggggatgacgtcaagtcatcatggcccttacgaccagggctacacacgtgctacaatggcgcatacaaagagaagcgacctcgcgagagcaagcggacctcataaagtgcgtcgtagtccggattggagtctgcaactcgactccatgaagtcggaatcgctagtaatcgtggatcagaatgccacggtgaatacgttcccgggccttgtacacaccgcccgtcacaccatgggagtgggttgcaaaagaagtaggtagcttaaccttcgggagggcgcttaccactttgtgattcatgactggggtgaagtcgtaacaaggtaaccgtaggggaacctgcggttggatcacctccttaccttaaagaagcgttctttgcagtgctcacacagattgtctgatagaaagtgaaaagcaaggcgtcttgcgaagcagactgatacgtccccttcgtctagaggcccaggacaccgccctttcacggcggtaacaggggttcgaatcccctaggggacgccacttgctggtttgtgagtgaaagtcacctgccttaatatctcaaaactcatcttcgggtgatgtttgagatatttgctctttaaaaatctggatcaagctgaaaattgaaacactgaacaacgaaagttgttcgtgagtctctcaaattttcgcaacacgatgatgaatcgtaagaaacatcttcgggttgtgaggttaagcgactaagcgtacacggtggatgccctggcagtcagaggcgatgaaggacgtgctaatctgcgataagcgtcggtaaggtgatatgaaccgttataaccggcgatttccgaatggggaaacccagtgtgtttcgacacactatcattaactgaatccataggttaatgaggcgaaccgggggaactgaaacatctaagtaccccgaggaaaagaaatcaaccgagattcccccagtagcggcgagcgaacggggagcagcccagagcctgaatcagtgtgtgtgttagtggaagcgtctggaaaggcgcgcgatacagggtgacagccccgtacacaaaaatgcacatgctgtgagctcgatgagtagggcgggacacgtggtatcctgtctgaatatggggggaccatcctccaaggctaaatactcctgactgaccgatagtgaaccagtaccgtgagggaaaggcgaaaagaaccccggcgaggggagtgaaaaagaacctgaaaccgtgtacgtacaagcagtgggagcacgcttaggcgtgtgactgcgtaccttttgtataatgggtcagcgacttatattctgtagcaaggttaaccgaataggggagccgaagggaaaccgagtcttaactgggcgttaagttgcagggtatagacccgaaacccggtgatctagccatgggcaggttgaaggttgggtaacactaactggaggaccgaaccgactaatgttgaaaaattagcggatgacttgtggctgggggtgaaaggccaatcaaaccgggagatagctggttctccccgaaagctatttaggtagcgcctcgtgaattcatctccgggggtagagcactgtttcggcaagggggtcatcccgacttaccaacccgatgcaaactgcgaataccggagaatgttatcacgggagacacacggcgggtgctaacgtccgtcgtgaagagggaaacaacccagaccgccagctaaggtcccaaagtcatggttaagtgggaaacgatgtgggaaggcccagacagccaggatgttggcttagaagcagccatcatttaaagaaagcgtaatagctcactggtcgagtcggcctgcgcggaagatgtaacggggctaaaccatgcaccgaagctgcggcagcgacgcttatgcgttgttgggtaggggagcgttctgtaagcctgcgaaggtgtgctgtgaggcatgctggaggtatcagaagtgcgaatgctgacataagtaacgataaagcgggtgaaaagcccgctcgccggaagaccaagggttcctgtccaacgttaatcggggcagggtgagtcgacccctaaggcgaggccgaaaggcgtagtcgatgggaaacaggttaatattcctgtacttggtgttactgcgaaggggggacggagaaggctatgttggccgggcgacggttgtcccggtttaagcgtgtaggctggttttccaggcaaatccggaaaatcaaggctgaggcgtgatgacgaggcactacggtgctgaagcaacaaatgccctgcttccaggaaaagcctctaagcatcaggtaacatcaaatcgtaccccaaaccgacacaggtggtcaggtagagaataccaaggcgcttgagagaactcgggtgaaggaactaggcaaaatggtgccgtaacttcgggagaaggcacgctgatatgtaggtgaggtccctcgcggatggagctgaaatcagtcgaagataccagctggctgcaactgtttattaaaaacacagcactgtgcaaacacgaaagtggacgtatacggtgtgacgcctgcccggtgccggaaggttaattgatggggttagcgcaagcgaagctcttgatcgaagccccggtaaacggcggccgtaactataacggtcctaaggtagcgaaattccttgtcgggtaagttccgacctgcacgaatggcgtaatgatggccaggctgtctccacccgagactcagtgaaattgaactcgctgtgaagatgcagtgtacccgcggcaagacggaaagaccccgtgaacctttactatagcttgacactgaacattgagccttgatgtgtaggataggtgggaggctttgaagtgtggacgccagtctgcatggagccgaccttgaaataccaccctttaatgtttgatgttctaacgttgacccgtaatccgggttgcggacagtgtctggtgggtagtttgactggggcggtctcctcctaaagagtaacggaggagcacgaaggttggctaatcctggtcggacatcaggaggttagtgcaatggcataagccagcttgactgcgagcgtgacggcgcgagcaggtgcgaaagcaggtcatagtgatccggtggttctgaatggaagggccatcgctcaacggataaaaggtactccggggataacaggctgataccgcccaagagttcatatcgacggcggtgtttggcacctcgatgtcggctcatcacatcctggggctgaagtaggtcccaagggtatggctgttcgccatttaaagtggtacgcgagctgggtttagaacgtcgtgagacagttcggtccctatctgccgtgggcgctggagaactgaggggggctgctcctagtacgagaggaccggagtggacgcatcactggtgttcgggttgtcatgccaatggcactgcccggtagctaaatgcggaagagataagtgctgaaagcatctaagcacgaaacttgccccgagatgagttctccctgactccttgagagtcctgaaggaacgttgaagacgacgacgttgataggccgggtgtgtaagcgcagcgatgcgttgagctaaccggtactaatgaaccgtgaggcttaaccttacaacgccgaaggtgttttggcggattgagagaagattttcagcctgatacagattaaatcagaacgcagaagcggtctgataaaacagaatttgcctggcggcagtagcgcggtggtcccacctgaccccatgccgaactcagaagtgaaacgccgtagcgccgatggtagtgtggggtctccccatgcgagagtagggaactgccaggcatcaaattagaaaaaccccggtccataaggccggggttttttgcatatcaattatttgcatgatgaagggaatctcatgagtgttctgtatatccaaattcgtcgtaatcaaattactgttcgcgatcttgaaagcaaacgtgaagtgagtggagacgctgccttcagtaaccagcgcctgttaatcgccaatttctttgttgcagaaaaagttctgcaagatcttgttctgcaactccacccacgtagtacctggcattcttttttgccagcaaaacgtatggatattgttgtgagcgcactggaaatgaatgagggcggtttgagtcaggttgaggaacgcattctccatgaagtggtcgctggggcaacgttaatgaaatatcgccagttccacatccatgcgcaaagtgcggtactcagtgatagtgcggtcatggcaatgcttaagcagaaataatcgtgtcaccattggtgggtactaaacctgaagttcagcccaccgggatgagaaaaaatcgcttacgcccccacatacgccagattcagcaacggatacggtttccccaaatcgtccacctcagagcgtcccgtaaccttaaaacccaccttcttatagaacccaaccgcctgctcattttgctcattaacgttggttgtcagttccggtgccatgctgagcgcatgctccaccagcacccgacctacgccgcagccgcgcacatcaggatcgataaacagcgcatccatatgctgcccacttagcaacataaatccaaccggctgatcccgctcattaaccgcgacccacaacggcgcttccggcaggaaggaacgaactaggtcctccagctcggtccgatactctgcacttagaaaatcgtgagtggcatcgacagaacgacaccaaatcgcaacgagttcctccccttcctcatgccgactgcggcgaatactaataaccattttctctccttttagtcattcttatattctaacgtagtcttttccttgaaactttctcaccttcaacatgcaggctcgacattggcaaattttctggttatcttcagctatctggatgtctaaacgtataagcgtatgtagtgaggtaatcaggttatgccgattcgtgtgccggacgagctacccgccgtcaatttcttgcgtgaagaaaacgtctttgtgatgacaacttctcgtgcgtctggtcaggaaattcgtccacttaaggttctgatccttaacctgatgccgaagaagattgaaactgaaaatcagtttctgcgcctgcttagtaacagtcctttgcaggtcgatattcagctgttgcgcatcgattcccgtgaaagccgcaacacgcccgcagagcatctgaacaacttctactgtaactttgaagatattcaggatcagaactttgacggtttgattgtaactggtgcgccgctgggcctggtggagtttaatgatgtcgcttactggccgcagatcaaacaggtgctggagtggagcaaagatcacgtcaccagcacgctgtttgtctgctgggcggtacaggccgcgctcaatatcctctacggcattcctaagcaaactcgcaccgaaaaactctctggcgtttacgagcatcatattctccatcctcatgcgcttctgacgcgtggctttgatgatagtttcctggcaccgcatagccgctatgctgactttccggcagcgttgattcgtgattacaccgatctggaaattctggcagagacggaagaaggggatgcatatctgtttgccagtaaagataagcgcattgcctttgtgacgggccatcccgaatatgatgcgcaaacgctggcgcaggaatttttccgcgatgtggaagccggactagacccggatgtaccgtataactatttcccgcacaatgatccgcaaaatacaccgcgagcgagctggcgtagtcacggtaatttactgtttaccaactggctcaactattacgtctaccagatcacgccatacgatctacggcacatgaatccaacgctggattaatcttctgtgatagtcgatcgttaagcgattcagcaccttacctcaggcaccttcgggtgccttttttatttccgaaacgtacctcagcaggtgaataaattttattcatattgttatcaacaagttatcaagtatttttaattaaaatggaaattgtttttgattttgcattttaaatgagtagtcttagttgtgctgaacgaaaagagcacaacgatccttcgttcacagtggggaagttttcggatccatgacgaggagctgcacgatgactgaacaggcaacaacaaccgatgaactggctttcacaaggccgtatggcgagcaggagaagcaaattcttactgccgaagcggtagaatttctgactgagctggtgacgcattttacgccacaacgcaataaacttctggcagcgcgcattcagcagcagcaagatattgataacggaacgttgcctgattttattagcgaaacagcttccattcgcgatgctgattggaaaattcgcgggattcctgcggacttagaagaccgccgcgtagagataactggcccggtagagcgcaagatggtgatcaacgcgctcaacgccaatgtgaaagtctttatggccgatttcgaagatagtctggcaccagactggaacaaagtgatcgacgggcaaattaacctgcgtgatgcggttaacggcaccatcagttacaccaatgaagcaggcaaaatttaccagctcaagcccaatccagcggttttgatttgtcgggtacgcggtctgcacttgccggaaaaacatgtcacctggcgtggtgaggcaatccccggcagcctgtttgattttgcgctctatttcttccacaactatcaggcactgttggcaaagggcagtggtccctatttctatctgccgaaaacccagtcctggcaggaagcggcctggtggagcgaagtcttcagctatgcagaagatcgctttaatctgccgcgcggcaccatcaaggcgacgttgctgattgaaacgctgcccgccgtgttccagatggatgaaatccttcacgcgctgcgtgaccatattgttggtctgaactgcggtcgttgggattacatcttcagctatatcaaaacgttgaaaaactatcccgatcgcgtcctgccagacagacaggcagtgacgatggataaaccattcctgaatgcttacagtcgcctgttgattaaaacctgccataaacgcggtgcttttgcgatgggcggcatggcggcgtttattccgagcaaagatgaagagcacaataaccaggtgctcaacaaagtaaaagcggataaaagcctggaagccaataacggtcacgatggcacatggatcgctcacccaggccttgcggacacggcaatggcggtattcaacgacattctcggctcccgtaaaaatcagcttgaagtgatgcgcgaacaagacgcgccgattactgccgatcagctgctggcaccttgtgatggtgaacgcaccgaagaaggtatgcgcgccaacattcgcgtggctgtgcagtacatcgaagcgtggatctctggcaacggctgtgtgccgatttatggcctgatggaagatgcggcgacggctgaaatttcccgtaccagcatctggcagtggatccatcatcaaaaaacgttgagcaatggcaaaccggtgaccaaagccttgttccgccagatgctgggcgaagagatgaaagtcattgccagcgaactgggcgaagaacgtttctcccaggggcgttttgacgatgccgcacgcttgatggaacagatcaccacttccgatgagttaattgatttcctgaccctgccaggctaccgcctgttagcgtaaaccaccacataactatggagcatctgcacatgaaaacccgtacacaacaaattgaagaattacagaaagagtggactcaaccgcgttgggaaggcattactcgcccatacagtgcggaagatgtggtgaaattacgcggtagtgtcaatcctgaatgcacgctggcgcaactgggcgcagcgaaaatgtggcgtctgctgcacggtgagagcaaaaaaggctacatcaacagcctcggcgcactgactggcggtcaggcgctgcaacaggcgaaagcgggtattgaagcagtctatctgagcggatggcaggtagcggcggacgctaacctggcggccagcatgtatccggatcagagcctctatccggcaaacagcgtgccagctgtggtggagcggatcaacaacaccttccgtcgtgccgatcagatccaatggtccgcgggcattgagccgggcgatccgcgctatgtcgattacttcctgccgatcgttgccgatgcggaagccggttttggcggtgtcctgaatgcctttgaactgatgaaagcgatgattgaagccggtgcagcggcagttcacttcgaagatcagctggcgagtgtgaagaaatgcggtcacatgggcggcaaagttttagtgccaactcaggaagctattcagaaactggtcgcggcgcgtctggcagctgacgtgacgggcgttccaaccctgctggttgcccgtaccgatgctgatgcggcggatctgatcacctccgattgcgacccgtatgacagcgaatttattaccggcgagcgtaccagtgaaggcttcttccgtactcatgcgggcattgagcaagcgatcagccgtggcctggcgtatgcgccatatgctgacctggtctggtgtgaaacctccacgccggatctggaactggcgcgtcgctttgcacaagctatccacgcgaaatatccgggcaaactgctggcttataactgcagcccgagcttcaactggcagaaaaacctcgacgacaaaactattgccagcttccagcagcagctgagcgatatgggctacaagttccagttcatcaccctggcaggtatccacagcatgtggttcaacatgtttgacctggcaaacgcctatgcccagggcgagggtatgaagcactacgttgagaaagtgcagcagccggaatttgccgccgcgaaagatggctataccttcgtatctcaccagcaggaagtgggtacaggttacttcgataaagtgacgactattattcagggcggcacgtctagtgtcaccgcgctgaccggctccactgaagaaagccagttctaagcaacaacaaccgttgctgactgtaggccggataaggcgttcacgccgcatccggcaatcggtgcacgatgcctgatgcgacgcttgcgcgtcttatcatgcctacagccgttgccgaacgtaggctggataaggcgtttacgccgcatccggcaattctctgctcctgatgagggcgctaaatgccgcgtggcctggaattattgattgctcaaaccattttgcaaggcttcgatgctcagtatggtcgattcctcgaagtgacctccggtgcgcagcagcgtttcgaacaggccgactggcatgctgtccagcaggcgatgaaaaaccgtatccatctttacgatcatcacgttggtctggtcgtggagcaactgcgctgcattactaacggccaaagtacggacgcggcatttttactacgtgttaaagagcattacacccggctgttgccggattacccgcgcttcgagattgcggagagcttttttaactccgtgtactgtcggttatttgaccaccgcagccttactcccgagcggctttttatctttagctctcagccagagcgccgctttcgtaccattccccgcccgctggcgaaagactttcaccccgatcacggctgggaatctctactgatgcgcgttatcagcgacctaccgctgcgcctgcgctggcagaataaaagccgtgacatccattacattattcgccatctgacggaaacgctggggacagacaacctcgcggaaagtcatttacaggtggcgaacgaactgttttaccgcaataaagccgcctggctggtaggcaaactgatcacaccttccggcacattgccatttttgctgccgatccaccagacggacgacggcgagttatttattgatacctgcctgacgacgaccgccgaagcgagcattgtttttggctttgcgcgttcttattttatggtttatgcgccgctgcccgcagcgctggtcgagtggctacgggaaattctgccaggtaaaaccaccgctgaattgtatatggctatcggctgccagaagcacgccaaaaccgaaagctaccgcgaatatctcgtttatctacagggctgtaatgagcagttcattgaagcgccgggtattcgtggaatggtgatgttggtgtttacgctgccgggctttgatcgggtattcaaagtcatcaaagacaggttcgcgccgcagaaagagatgtctgccgctcacgttcgtgcctgctatcaactggtgaaagagcacgatcgcgtgggccgaatggcggacacccaggagtttgaaaactttgtgctggagaagcggcatatttccccggcattaatggaattactgcttcaggaagcagcggaaaaaatcaccgatctcggcgaacaaattgtgattcgccatctttatattgagcggcggatggtgccgctcaatatctggctggaacaagtggaaggtcagcagttgcgcgacgccattgaagaatacggtaacgctattcgccagcttgccgctgctaacattttccctggcgacatgctgtttaaaaacttcggtgtcacccgtcacgggcgtgtggttttttatgattacgatgaaatttgctacatgacggaagtgaatttccgcgacatcccgccgccgcgctatccggaagacgaacttgccagcgaaccgtggtacagcgtcagcccgggcgatgttttcccggaagagtttcgccactggctatgcgccgacccgcgtattggtccgctgtttgaagagatgcacgccgacctgttccgcgctgattactggcgcgcactacaaaaccgcatacgtgaagggcatgtggaagatgtttatgcgtatcggcgcaggcaaagatttagcgtacggtatggggagatgcttttttgagtaaagcttccatataatttttctccgcaatgtatcgagggttatccgtaaagccaaagctttcagccatcttatttaatgtattaaggattaattcagcaataacccggtgaccaaattcaaaagccaactcaaaggcagagtatttttgtggggctttgtgttgccaaaaatccataatatcttcagcggtaaatccaaacaggcgtgcatggtcagataaagcaagataaaccgtctctacaacattttgttgtttatgctgtatcgcactaaacaaaccgggatattcattagaattatttgccaggaggaggggcttcatattttttttatcgaatttaaacgtattaaacagagtgggtaatgcgttaaaaatagtattaataacgttcatgtgtccgcgctgcatggccataaacaaacccgtgtcgcgcgcaagacttttagcggtcagaagatctacaatatcggaagcactaatgttaatttcctgggctaggctgggcaatgcttcaagaataactttcacgatatcgctatgtccattttgcatcgccagatatagtcctgggcaaccataaaaatcctttgccttcaggagatcgagtacctgttctttagtcaaatgacatgtgcgaattaacaaaggtaacgcgttcaaaacaattttcagcatgtcggcatcaccattcgccataacatggtataaaacatggctggacgttctatttttggcactcaggaatttatacacttgttcgttatctaaatgatgtgttgcggccagtttaggtaaggcgttcagaatgctggttacaacatttttatccttacgacttatcgctaaaaataatccagaaaaaccatttttatcttttgcctccagaatatgcatgagattttttttgctgagtaatccttcatatcctgtttcactcaaactattgaaaatagtctcaacgatatccgcattaccataatttatagccaaatataaacctggcaggttaatactattataggcagtcaacatttctgttctatgtagttctggcattttctggagttgaatcatcagttgcgtaagttggtgattctgaccaattgccattagcaaattcatcgttgcaggacttaatggaggggttatttcatccacagatccttttaacatcaatagctgttctttcggaagtgctggaattattgcaacagattgattaataacatgatcattactccatttcaggaggctataatctacattcataaaatccatcagagaatagtgtttaatattctctttgctttcgctcataattcttattttatcgttagttacattaggatcataaacgctaaccacgtaatgggtacatccttcagttgtgttctttattcttagccggaccgtcaaagcatggttatccaccagtaatatggctgccataacactgatgccattactttccatcttgtcaaaatatgctttcataactagcccgaaatcaccgcaggcagcaacgcaacgcccctcaggacggctggaaaccaacgccaaagtctggtttttgcattttttgttgaagtgcgtgagaaatttttcagcactagagtaatcatcttgatggggtttgtaatcaacattctgataaatatcattaatatattgtgcagcaatgtgtcggcatactatacggttttggggtcgccccggaaaataacattgaccattaagtttaattcttgggaattctttttcttttctatcactttttaggtttaattcttgtttatcaagagtgtcactgcgttgaggtaaaatttccattaggtatttttcaaatattggggcaatggtttgagtaagtgtcgtgttttcgtttttattaattatcgtaatttctttcttatcagcttgtaagacggacgtggaaaatttaatgacaaaatccttgttgctaaagatatgacgaccattttgtctacagttctcactgaagctttttaatagaggcgtcgccagctccttgccagaaaatttatcctcgagttctttataaaacaattcactcagggtttggtgttcatttgtctgggctgtattattaatatttgcagagaaagaactacgaggaatacgagtaatcatttaaatatctcattgtttattgatgtcttgaattttaactatcagaacagtgaaaaaatttaatatgattacaactaaagaaatatcataaatcgctcaatctcataatgcagccgtaaaagtttcggtggaatgagatcttgcgattttgttaataattaagtggtttgatgtttaaaaataatgctgagttaataaaagtgtgtgaagtgtatgacattaagttattttggcgtcaatgcgattaacagacacccttattctattgccactcaggtatgatgggcagaatattgcctctgcccgccagaaaaagtcagcgcattccaccgtacgccagcgtcacttccttcgccgctttaatcaccatcgcgccaaactcggtcacgcggtcatcggtaatacgactaatcggtccggaaatagaaattgcggcaaacggttcacggtgctcatcgaaaatacacgctgcaaggcaacgtagccccagtgcatgttcctcatcgtcaaaactataaccccgtttgcgcgtttgggcgagatcttcttttaaatgcacaggagacaccagcgttgcgtgggtataggcatgtaaccctttgcggtgcagcagcttcgtcacctgttcttcgctcagttgggctaaaaaggctttacccgcaccggaagcgtgcatcggcaatttaccgccgataggcgcggacattcgcatcagatgcgtacactgtacctggtcgataataatcgcttcgtgatcgctttgatcaagcaccgccatattgaccgtttcgccagactcttccattagattgcgcaggatagggtgaacaatcgctaacaaattacggctctggagaaagctgctgccgaccataaaggcatgtgcgccgattgcccaatgtcccagttcgccaacctgacgcacgaaaccctgctgttgcatcgtggttagcaggcggtgggtcgtggaattgggtaacccggcttgttgcgccagttccgtgagtgccacactgccattggattcggcaatccactccagtaatttcaggccacgcgttaaagactgaacctgtccagtcgctggtgcggtggcaacggcgggttttctgccgcgtttcgcgggaatgggtgcgaccatgacagtctcttttttctgtatcgtggaaatcattttcatttttattgttagctaatgcaatagttactgaactgatccgatgagttaatgttgaacaaatctcatgttgcgtggtggtcgcttttaccacagatgcgtttatgccagtatggtttgttgaatttttattaaatctgggttgagcgtgtcgggagcaagtgtgagcagcaaagtggaacaactgcgtgcgcagttaaatgaacgtattctggtgctggacggcggtatgggcaccatgatccagagttatcgactgaacgaagccgattttcgtggtgaacgctttgccgactggccatgcgacctcaaaggcaacaacgacctgctggtactcagtaaaccggaagtgatcgccgctatccacaacgcctactttgaagcgggcgcggatatcatcgaaaccaacaccttcaactccacgaccattgcgatggcggattaccagatggaatccctgagcgcggaaatcaactttgcggcggcgaaactggcgcgagcttgtgctgacgagtggaccgcgcgcacgccagagaaaccgcgctacgttgccggtgttctcggcccgaccaaccgcacggcgtctatttctccggacgtcaacgatccggcatttcgtaatatcacttttgacgggctggtggcggcttatcgagagtccaccaaagcgctggtggaaggtggcgcggatctgatcctgattgaaaccgttttcgacacccttaacgccaaagcggcggtatttgcggtgaaaacggagtttgaagcgctgggcgttgagctgccgattatgatctccggcaccatcaccgacgcctccgggcgcacgctctccgggcagaccaccgaagcattttacaacagtttgcgccacgccgaagctctgacctttggcctgaactgtgcgctggggcccgatgaactgcgccagtacgtgcaggagctgagtcggattgcggaatgctacgtcaccgcgcacccgaacgccgggctacccaacgcctttggtgagtacgatctcgacgccgacacgatggcaaaacagatacgtgaatgggcgcaagcgggttttctcaatatcgtcggcggctgctgtggcaccacgccacaacatattgcagcgatgagtcgtgcagtagaaggattagcgccgcgcaaactgccggaaattcccgtagcctgccgtttgtccggcctggagccgctgaacattggcgaagatagcctgtttgtgaacgtgggtgaacgcaccaacgtcaccggttccgctaagttcaagcgcctgatcaaagaagagaaatacagcgaggcgctggatgtcgcgcgtcaacaggtggaaaacggcgcgcagattatcgatatcaacatggatgaagggatgctcgatgccgaagcggcgatggtgcgttttctcaatctgattgccggtgaaccggatatcgctcgcgtgccgattatgatcgactccagtaaatgggacgtcattgaaaaaggtctgaagtgtatccagggcaaaggcattgttaactctatcagcatgaaagagggcgtcgatgcctttatccatcacgcgaaattgttgcgtcgctacggtgcggcagtggtggtaatggcctttgacgaacagggacaggccgatactcgcgcacggaaaatcgagatttgccgtcgggcgtacaaaatcctcaccgaagaggttggcttcccgccagaagatatcatcttcgacccaaacatcttcgcggtcgcaactggcattgaagagcacaacaactacgcgcaggactttatcggcgcgtgtgaagacatcaaacgcgaactgccgcacgcgctgatttccggcggcgtatctaacgtttctttcagcttccgtggcaacgatccggtgcgcgaagccattcacgcagtgttcctctactacgctattcgcaatggcatggatatggggatcgtcaacgccgggcaactggcgatttacgacgacctacccgctgaactgcgcgacgcggtggaagatgtgattcttaatcgtcgcgacgatggcaccgagcgtttactggagcttgccgagaaatatcgcggcagcaaaaccgacgacaccgccaacgcccagcaggcggagtggcgcagctgggaagtgaataaacgtctggaatacagcctggtcaaaggcattaccgagtttatcgagcaggataccgaagaagcccgccagcaggctacgcgcccgattgaagtgattgaaggcccgttgatggacggcatgaatgtggtcggcgacctgtttggcgaagggaaaatgttcctgccacaggtggtcaaaagcgcgcgcgtcatgaaacaggcggtggcctacctcgaaccgtttattgaagccagcaaagagcagggcaaaaccaacggcaagatggtgatcgccaccgtgaagggcgacgtccacgacatcggtaaaaatatcgttggtgtggtgctgcaatgtaacaactacgaaattgtcgatctcggcgttatggtgcctgcggaaaaaattctccgtaccgctaaagaagtgaatgctgatctgattggccttagcgggcttatcacgccgagcctggacgagatggttaacgtggcgaaagagatggagcgtcagggcttcactattccgttactgattggcggcgcgacgaccagtaaagcgcacacggcggtgaaaatcgagcagaactacagcggcccgacggtgtatgtgcagaatgccagccgtaccgttggtgtggtggcggcgctgctttccgatacccagcgtgatgattttgtcgctcgtacccgcaaggagtacgaaaccgtacgtattcagcacgggcgcaagaaaccgcgcacaccaccggtcacgctggaagcggcgcgcgataacgatttcgcttttgactggcaggcttacacgccgccggtggcgcaccgtctcggcgtgcaggaagtcgaagccagcatcgaaacgctgcgtaattacatcgactggacaccgttctttatgacctggagcctggccgggaagtatccgcgcattctggaagatgaagtggtgggcgttgaggcgcagcggctgtttaaagacgccaacgacatgctggataaattaagcgccgagaaaacgctgaatccgcgtggcgtggtgggcctgttcccggcaaaccgtgtgggcgatgacattgaaatctaccgtgacgaaacgcgtacccatgtgatcaacgtcagccaccatctgcgtcaacagaccgaaaaaacaggcttcgctaactactgtctcgctgacttcgttgcgccgaagctttctggtaaagcagattacatcggcgcatttgccgtgactggcgggctggaagaggacgcactggctgatgcctttgaagcgcagcacgatgattacaacaaaatcatggtgaaagcgcttgccgaccgtttagccgaagcctttgcggagtatctccatgagcgtgtgcgtaaagtctactggggctatgcgccgaacgagaacctcagcaacgaagagctgatccgcgaaaactaccagggcatccgtccggcaccgggctatccggcctgcccggaacatacggaaaaagccaccatctgggagctgctggaagtggaaaaacacactggcatgaaactcacagaatctttcgccatgtggcccggtgcaagcgttagcggttggtacttcagccacccggacagcaagtactacgctgtagcacaaattcagcgcgatcaggttgaagattatgcccgccgtaaaggtatgagcgttaccgaagttgagcgctggctggcaccgaatctggggtatgacgcggactgattcacaaatctgtcacttttccttacaacaaacagggcgctcaatgagtgccctgtctctttattaatatgaaacacttatactggaaacaggctggaataatcttagccggaaaaacgaatgtcaaaaggcacagtaaagatgccagtcagcgtgtttccggtcctttggtcattcaattgcttcaggaacatataacgataaggagaacctgaactcgtgttaacgctgcttcacctgctttctgccgtcgccctgctggtctgggggactcatattgttcgaaccggcgtaatgcgcgtcttcggcgcgcgtttgcgtactgtccttagccggagcgtcgaaaaaaagccgctcgccttttgcgcggggatcggcgttaccgcactggtacagagcagtaatgccaccaccatgctggtgaccagctttgtcgctcaggatctggtagccctcgcaccggctctggtcattgtgctgggtgcagatgtcgggacggcgctaatggcgcgtattctcaccttcgacttatcctggctgagtccgttacttatttttatcggcgtgatttttttcctcggacgcaaacagagtcgcgccgggcaactgggccgcgtcggtattggtcttgggctgattttgctagcgctggagttgattgtgcaggccgtaacgccgatcacccaggcaaacggcgttcaggtgatctttgccagcctgaccggcgatattctgctggatgcgctgattggcgcgatgttcgccattatcagctactccagccttgctgctgtactgctgaccgcgactctgaccgccgcaggcattatctccttccccgtggcgctctgtctggtgattggtgctaacctcggttccggtctgctggcaatgctcaacaacagtgccgccaatgccgcagcccgccgtgtcgcgctgggtagtctgctgtttaagctggtgggtagcctgattatcctgccgtttgtccatttgctggcagagacaatggggaagttgagtttgccaaaagcggaactggtgatctatttccacgtcttctacaaccttgtacgttgcctggtcatgctgccatttgttgacccgatggcacggttttgcaaaacgattattcgcgatgaaccggaactggatacccagctacggcctaaacatctggatgtcagcgcgctggatacgcccacgcttgctctggcgaacgccgcgcgcgaaaccctgcgcattggcgacgccatggaacagatgatggaagggttgaataaagtgatgcacggtgagccacggcaggagaaagagctgcgtaagctggcagatgatatcaacgttctctacaccgccattaagctgtatctggcgcggatgccaaaagaagagctggcggaggaagagagccgccgctgggcagagatcatcgaaatgagcctcaaccttgaacaggcctccgatatcgtcgagcgcatgggcagcgaaattgctgacaaaagtctggcagcacggcgggcatttagccttgatgggttgaaggaactggatgcgctctatgagcaattgctcagtaatttaaagctggcaatgagcgtgttcttctctggcgatgtcaccagcgctcgtcgtttgcgtcgcagcaaacatcgttttcgcattcttaatcgccgctattcccacgcccacgtcgatcgcctgcatcagcaaaacgtgcagagcattgaaaccagtagcctacatttaggcttactgggagatatgcagcgcctgaacagcctgttttgtagcgtggcttacagtgtgctggaacagccggatgaagatgaaggacgggacgagtattaatattgtgaatcctgtaggcctgataagacgcgtcaagcgtcgcatcaggcactatgaacaagatgccggatcatgcatccggcaattcacttaaaaacggtgaccagcttccagcggaaccgcttcttcaccagccttaaacacataagtggtgttcgggccacccagcgtagcgtgacctttactcactgtgatccagttaccttccggtagaccaataatcgtcagttctggcgcgacgaccagcagttcgcgaatacgctgctcacgggtttcacctttatggccttccggcagcgcgttggtgaagtgcgggttgatttgcagcgggaacagatttagcgcatcgaaaccttgcggatcgacaatcggcatatcgttggtggtacgaatagttgggcaagcaaggttagcgcctgcgctccagccaatatacagagcgccacgtttaaccacgtcagtaattggtgccagcagcccgcgctcgcggcactgtttcagcaactggaaagtattcccgccgccgacaatcacgatctcagcattttcaatcgcggcaacgggatcgacaacgctatgaataccggtgacagaaacacccagcggagcgagaaccgcagccgttttcgctgtgtaatcatcccaggtctgcgttacgccagcgaaagggataaacaccgcactgcggcgaccctgcaactgttcagcaattagcggcagtgcatgttccagccaggctttacccggcagcgtgctgttactcaataaaagcagttccattacttctccggttagtaagaaatcacgggaggcatgctaccactgcgaatttaaccacttactgacatggctcacgatgtcgcacattgcttctggaaagtgatttgagcaggtaacgaattcaagccaatggaaataacaaatagttcgctcatgactattttttatcaacccaaaggtacggtatattccgttttttacaggagaatttatgctgcccgacagtagtgtccgtttaaataaatacatcagcgaaagcggaatttgcagtcgccgcgaagcggatcgctatatcgagcaaggcaatgtgttccttaatggcaagcgagccaccattggcgatcaggtgaaacccggcgacgttgtgaaagtaaacggtcagttgattgaacctcgggaagccgaagatttggtacttatcgccctgaacaagcccgttggtattgtaagcaccaccgaagatggcgagcgcgataacattgtcgatttcgttaaccacagcaaacgcgtgttcccgattggccgcctggataaagactcccaggggctgattttcctcaccaatcacggcgatctggtgaataagatcctgcgtgctggcaatgatcatgagaaagagtatctggtgacggtcgataaaccgattaccgaggagtttattcgcggcatgagtgcgggggtgccaatcctcgggacagtgaccaaaaagtgcaaagttaaaaaagaagcgccgtttgtcttccgcattaccctggtgcaggggctgaaccgtcagatccggcgcatgtgcgagcatttcggctatgaagtgaaaaagctggaacgcacgcgcatcatgaacgttagcttaagcggcattccgctgggggaatggcgcgatttaaccgacgatgagttaatcgacctctttaagctcattgaaaattcctcttccgaggtaaaacctaaagcgaaggccaaaccgaaaacagcgggcatcaaacgtccagtcgttaagatggaaaaaacggcggaaaaaggcggtcgcccggcgtccaacggtaagcgttttaccagcccggggcgtaaaaagaaggggcgctgattaacgcctcagactgatgaaaacggcccaaaagtgcccggacagtcccctcgccccttcgggaaaagggttagggtgaggggaaaattgtgttcacactgacgagtgaaaatctcaggcgttgattgtggattagcgcctgccgcgcgtgctcgtatttgcactccagctaaaactcgcttcaggatccggtttataagcctgctttttcttcaactggcgggcttttttcgcttcagcctcacgctcaaccattaatttatcgatgtaatctttcttaatgctgttggtttcggagttggtcaatacgcgaccatgcgcaatccgcgcccgatccagcagtgttttaagttcacgctgctcgcgttcagtcatctctttttgggtaatacgggggagtgccatgatggtgccctcagtgagccagagagttcagtgtacgggaattcgtttgcgagcagaactgataatattcattttgccttctcttaactatttatctctttcgataattaattagagatgcagataaaaaaattaaaggcaattattctccgataaagacgctggttaacagagtacaggctcgtttattgatgagcatagtgacaagaaaatcaatacggcccgaaatatagcttccaggccatacagtatttactcaaacaaattactatgcagtttttgcaccacctgctcggcatcttcgccgggcaccaggaagcacaggttatggctggatgcgccataacaaatcatgcgaatgttgaacggttccagtacgccgaatacctctttgccaacgccgcaggctttactcaggtcattgccaatcaacgcgaccagcgccagaccttcttccacctccacccgacacagtgcggaaagctccatcagcagagattgcgtcagcaacgtatcgccagtggaggtactaccggtggtatcaagggttaatgccacgctcacttcactcgtggtgattaagtctacgctaatattatgccgcgcgaggatgccgaaaacttccgcgaggaaaccgcgagaatgcagcatattcaggctgtgcaaagtgagcagagtctgattgcgacgaagcgccagagcgcggaacagcggcggattttcagttttattgcacaccagcgtaccacctgcgcgtgggtctttgctggagccgacaaagaccgggatatcgctgcgtactgcgggtagcaacgttgccggatgcagtacttttgcaccaaaagttgccatctctgccgcttcggcaaacgcgatttcatcaatgcgttttgctgcggaaactacgcgtggatcggtggtgtagatgcccgggacgtcggtccagatatcaacacgagatgcgtgtaaagcctccgccagcaaggctgccgtataatcgctgcctccacggccaagcgtcgttgtacgacctttattttcgctaccgataaatccctgggtgatcactaagccttcattgagacgtgggagcagctgcagcgcggccagttccgccagcgcggctatatctggctctgcacgaccaaatcggtcgttggtacgcatcactttacgtacatcaaaccactgtgcctgaacatcgcgttcgcgcaggatctcaacaaacagcagggtgctcatcagctcgccgtggctgaccagctcatctgtcagcgccggagacgttgccagcgccgccgcttctgccagaacagtaatgttctccagcagacgttcaatctcttcacggataacgttcgggtaacgcagacgttccagaatggcaaactggatgttgcggatagcgtcgagtttttcgaatcgctcgccaggttccagtccttcagctaaagcgaccagcagattagtgataccagcagaagcgctgaggacaactaaacgcacgttggcatcagaaagcacaatatcagcgctgcggttcatggcgtcaaaatcagctacgctggtaccgccaaatttggagacaacaatttcagacataactacctcgtgtcaggggatccattttcagccttggcacaagggaagagcggaagacgggtgggcgcagagcgatacttcgctactattttcacccagaagtgctccaccacttgcgaaacgcccgactgcgaacgcttctggtgacaacccaggggattcagcccctgtagccgatgatgaacgtggccagccgttcaatcacctcggcgatgcaccccctcaggtgttatcacaggactggctcctccaacaccgttacttgggcaacgcgcctcttctggcctgcgctagcgcaggtagtacatttataaataaagggtgagcggggcggttgtcaacgatggggtcatgcggatttttcatccactcctggcggtcagtagttcagctaataaatgcttcactgcgctaagggtttacactcaacattacgctaacggcactaaaaccatcacatttttctgtgactggcgctacaatcttccaaagtcacaattctcaaaatcagaagagtattgctaatgaaaaacatcaatccaacgcagaccgctgcctggcaggcactacagaaacacttcgatgaaatgaaagacgttacgatcgccgatctttttgctaaagacggcgatcgtttttctaagttctccgcaaccttcgacgatcagatgctggtggattactccaaaaaccgcatcactgaagagacgctggcgaaattacaggatctggcgaaagagtgcgatctggcgggcgcgattaagagcatgttctctggcgagaagatcaaccgcactgaaaaccgcgccgtgctgcacgtagcgctgcgtaaccgtagcaataccccgattttggttgatggcaaagacgtaatgccggaagtcaacgcggtgctggagaagatgaaaaccttcagtgaagcgattatttccggtgagtggaaaggttataccggcaaagcaatcactgacgtagtgaacatcgggatcggcggttctgacctcggcccatacatggtgaccgaagctctgcgtccgtacaaaaaccacctgaacatgcactttgtttctaacgtcgatgggactcacatcgcggaagtgctgaaaaaagtaaacccggaaaccacgctgttcttggtagcatctaaaaccttcaccactcaggaaactatgaccaacgcccatagcgcgcgtgactggttcctgaaagcggcaggtgatgaaaaacacgttgcaaaacactttgcggcgctttccaccaatgccaaagccgttggcgagtttggtattgatactgccaacatgttcgagttctgggactgggttggcggccgttactctttgtggagtgcgattggcctgagcattgttctctccatcggctttgataacttcgttgaactgctttccggcgcacacgcgatggacaagcatttctccaccacgcctgccgagaaaaacctgcctgtactgctggcgctgattggcatctggtacaacaatttctttggtgcggaaactgaagcgattctgccgtatgaccagtatatgcaccgtttcgcggcgtacttccagcagggcaatatggagtccaacggtaagtatgttgaccgtaacggtaacgttgtggattaccagactggcccgattatctggggtgaaccaggcactaacggtcagcacgcgttctaccagctgatccaccagggaaccaaaatggtaccgtgcgatttcatcgctccggctatcacccataacccgctctctgatcatcaccagaaactgctgtctaacttcttcgcccagaccgaagcgctggcgtttggtaaatcccgcgaagtggttgagcaggaatatcgtgatcagggtaaagatccggcaacgcttgactacgtggtgccgttcaaagtattcgaaggtaaccgcccgaccaactccatcctgctgcgtgaaatcactccgttcagcctgggtgcgttgattgcgctgtatgagcacaaaatctttactcagggcgtgatcctgaacatcttcaccttcgaccagtggggcgtggaactgggtaaacagctggcgaaccgtattctgccagagctgaaagatgataaagaaatcagcagccacgatagcagcaccaatggtctgattaaccgctataaagcgtggcgcggttaatcatcgtcgatatgtaggccggataaggcgttcacgccgcatccggcaaccgatgcctgatgcgacgcggtcgcgtcttatcaggcctacaggtcgatgccgatatgtacatcgtattcggcaattaatacatagcacgattgattaaataaccttaataacaatgccgacgttatgtcggcatttttttatcagataaatccccttgtctgtaatttaacggaaatcataccgtgaggttaatcctaaaatagatttttaatcgttgtttatttcggaaaatacgcagattaattgcttttgtttttattttaagtttatgatttttattgttatttaaatataagttgaaacttatatttgatattcattccaattatcctaaaacgccatcgctaattccccgcgccgtaattcgcatgctttagttgtgtatactcgatcccgcccgaaatgtttttgggtaaatctccattcattcaatgaagggaaattgttatgaaaaaagttctgtatggcatttttgccatatctgcgcttgcggcgacttctgcgtgggctgcacctgtacaggtgggcgaagcggcagggagcgcagcaacgagcgttagcgcggggagttcctccgcgaccagcgtcagcaccgtaagcagcgcggtgggtgtcgcgcttgcggcaaccggtggcggtgatggttctaataccgggaccaccacaaccacgaccaccagtacccagtaataaagtatgtatccccaaaataattcgagtcattgcatctgtggctagaagtatgaagggattaaccataaccacactccggtgtggttattctgcccctctggagaagagtcgtgaagcgacctgcactcattcttatctgcctgttattacaggcctgtagtgccacgactaaagagctgggcaatagtctgtgggacagtctgttcggcacgccaggcgtacagctgacggatgatgatattcaaaatatgccctacgccagccagtacatgcagcttaatggcgggccgcagttatttgtggtgctggccttcgctgaagacggacaacaaaaatgggtcactcaggatcaggctactctcgttacccaacatggccgtctggtgaagactctgctcggcggcgacaacctgattgaagtgaataaccttgctgccgacccgctgattaaacccgcacaaatcgttgatggcgcaagctggacgcgcacgatgggctggaccgagtaccagcaggtacgctacgccaccgcacgcagtgtcttcaaatgggatggcaccgataccgtcaaagtcggcagcgatgaaaccccggttcgcgtgctggacgaagaagtctccaccgaccaggcgcgctggcataaccgctattggatcgacagcgaagggcaaattcgccagagcgaacagtatctcggcgcggattattttccggtgaaaaccactctcatcaaggcggcaaaacaatgattaaacaaactattgtcgcgttgcttttgagtgtgggagcgagtagcgtcttcgcggcaggaaccgtcaaggtgttcagcaatggcagcagtgaggccaaaacgctaacgggcgcagagcatttaatcgatctggtaggccaaccgcggctggcaaacagctggtggcccggtgcggtgattagcgaagagctggcaacggcggcagcattgcgtcagcagcaggcgttgctgacacggctggcagaacagggcgcagattccagcgccgacgatgccgctgcgattaacgccttacgccagcaaattcaggcgttgaaagtgacgggcaggcaaaaaatcaatcttgatcccgatatcgtccgcgttgccgaacgcggtaacccgccgttgcagggcaactacacgctgtgggtcggaccaccgccgtccacggtcacgttgttcgggcttatcagccgtcctggcaagcagccattcactccaggtcgcgacgtggcgagctatctctctgaccagagcctgctcagcggtgcggatcgcagctacgcgtgggtggtttacccggacggacgcacgcaaaaagcgccggtggcttactggaacaagcgtcacgtagagccgatgcccggcagcattatttatgttggcctcgcggactccgtctggagtgagacgcctgatgcccttaacgccgacattcttcagactctgacgcagcggatacctcaataatgaaaaaaagacatctgcttagcttactggcgctgggcattagcacagcttgctacggcgaaacatatcctgcgcccattggtccgagccagagcgatttcggtggcgtaggattattacaaacgcccaccgcgcgtatggcacgggaaggggagttgagtctgaactatcgcgataacgatcagtaccgttattacagtgctagtgtgcaactcttcccgtggctggaaacaacgctgcgctacaccgacgtgcgcacccggcagtacagcagcgtcgaagcgttctctggcgatcaaacgtataaagataaagccttcgatctcaaactgcgtttgtgggaagagagttactggctgccgcaagtggcggttggtgcgcgggatatcggcggtacggggctgtttgatgcggaatatcttgttgccagcaaagcctgggggccgttcgattttacgctcggcctgggctgggggtatttgggcaccagcggtaatgtgaaaaatccgctctgtagtgccagtgataaatattgctatcgcgataacagctacaaacaggcgggatctatcgacggtagccagatgttccacggtcctgccagtctgtttggcggcgtggaataccagacgccctggcaaccgctgcgcctgaaactggagtatgaaggcaataattatcagcaggattttgccgggaagctggagcaaaaaagtaagtttaacgtcggtgcgatttatcgcgttaccgattgggccgacgttaaccttagctatgaacgtggcaacacctttatgtttggcgttacgttgcgcaccaactttaacgatctgcgcccgtcttacaacgataacgcccgcccgcaatatcaaccgcagccgcaggatgccattttgcagcatagcgtggtggcgaatcagttaacgctgttgaaatacaatgccggacttgccgatccacagatccaggcgaaaggcgatacgctgtatgttaccggcgagcaggtgaaatatcgtgatagccgcgaagggatcatccgtgcgaatcggatcgtgatgaacgatctgccggatgggatcaaaacgatccgcattacggaaaatcgccttaacatgccgcaggtgacgacggaaaccgatgtcgccagcctgaaaaatcatctcgccggagagccgttgggccacgaaacgacgctggcgcaaaaacgcgtcgagccagtggttccgcagtccaccgagcagggctggtatatcgacaaaagtcgctttgatttccatatcgatccggtgctgaaccagagcgtcggtggcccggaaaacttttacatgtatcagctgggcgtgatgggaacggcagatttgtggctgacggaccatctgctgaccaccggcagcctgtttgcaaatcttgccaacaactacgacaagtttaactacactaatcctccgcaggacagccacttaccgcgcgtgcgtacccatgtgcgcgagtatgtgcagaacgatgtctatgtgaataacctgcaagccaactacttccagcatctgggcaacggcttctacggtcaggtctacggtggttatctcgaaaccatgtttggcggtgcgggggcagaagtgttgtatcgcccgctggacagcaactgggcgtttggtctggatgccaactacgttaaacagcgcgactggcgtagtgcaaaagatatgatgaaattcaccgactacagcgtgaaaaccggacatctgaccgcctactggacgccatctttcgctcaggatgtgttagttaaagccagcgtcgggcagtatctggcaggggataaaggcggcacgctggagatcgccaaacgctttgatagcggcgtggtggtgggtggctatgccacgatcactaatgttagcaaagaggagtacggcgaaggggacttcaccaaaggcgtgtatgtcagcgtaccgttggatctcttcagctctggcccgacacgcagccgtgcggcgattggctggacgccgctgacgcgtgacggtggtcagcaacttgggcgtaagttccagttgtatgacatgaccagcgaccgtagcgtcaatttccgctaagtcatgggaaaggtgccagttttcgcactcactggcaccttcattcttaatggcctgtcgagccatcaggaacgcagttcactcccggtttgcgatctggtgtgtaaaggcgaaaacattctgtcttcctgtccgtcgatatcggttgcaggtctggttgcctgagcgactgggccatcattgggctggagacattgctttgcggtaggtcggctttatcagcagtaccgagcggaccagcataagcaggaagaacagagactgataacatcaaagcagcaaaataaggcttcatttttaccacctttatcaggttacgtttcatttgttccagaggaacattgtcgatttttcgcgcattgctggtggctgggaatcacctgaatgggtgatttttgaattaccggctttggtgcggtttgtcttgccggatgcgccgccaggcgcggcttatccggcctacgggtaggtatatccggctttggtggaggcgcgctccaaatccaggttgaacaaaacatacacaaaaaatatagatctccgtcacatttttgcgttatacaggaagctcgccactgtgaaggaggtactgctatgacgagtctctctcgtccgcgcgtggagtttatctccaccattttgcagaccgtactcaatcttggcctgctgtgcctcggcctgattttggttgtcttcctcggcaaagaaacggtgcatctggctgatgtgctgttcgcgccagaacaaaccagcaaatatgagctggtagaaggactggtggtttactttctctatttcgaatttatcgcgctgattgtgaagtactttcagtccggttttcacttcccgctacgttactttgtctatattgggatcaccgccattgtgcgcttgatcatcgtcgatcataaaagcccactggatgtgttgatctacagcgctgcgatcctgttactggtgatcaccctgtggctgtgtaatagcaaacggctgaagcgggagtaaaaagtcagcacgccgaaatggcgcggcgtgctggacaggaagattacagcgtagcagtttgttgtgttttcttcgtttccggttcccagagcgcttccagctcctcaagggttttacctttggtttccgggacaaatttccacataaacagtgctgccagaacgcccatacaaccgtaaatccagtaggagaaaccgttgtggaaatgggccaccagccaggagtttttgtccatcatcgggaaggtccaggagacgaagtagttcgccagccactgggccgccaccgcgattgccagcgctttaccacgaatagcattcgggaagatttcgctcagcagtacccagcataccggaccccaggacatggcaaaggcggcaacatagaacagcatgctcagtagcgccacaatacccggtgcctgagtgtaaaacgcggtaccgaggctaaacataccgattgccattccgagtgcgccgataatttgcagtggcttacgaccaaatttatccaccgtcataattgccagaacggtgaaggtgaggttgataactccgacaataatggtctgcaacagcgcgatatccgtgctggcccccagcgttttgaacacttccggcgcgtagtacagcaccacattgatgccgacaaattgctggaagatggagagcattacgccgattacaatcacgcccacgccaaacatcagcagacgaccaccggttttgcggccatgatccagggagtgtttaatttcctgtactgcctgagttgcaagcgtgttgcccataattttgcgcaggataccttccgcctgttcttgcttgccgcggctcatcagccagcgaggactttctggcacggtatacagcagcattaagaacagcagtgcagggatacattcgctggcaaacatataacgccagccgtcagtattcagccagctggcatcaccggaacgggcaataaaatagtttacgcagtaaactaaaagttgcccgaaaataatcgcaaactggttaaaagagaccagtttcccgcgaatatgagctggagccagttccgcaatatacattgggctgagcatactggctaaaccaacgccaataccgccaataatgcgataaataacaaattccgggacataacctgccagataaacaggcacagtgttgtccgggtttatagaggtaaaaccaagttctggccaggcagaacctacaccagaaataaaaaacaggacagcagcaatcttaagactatcacgacgaccgaagcggttactgcaataaccaccgagggcaccgccgatgatgcaaccaatcagagcgctggccacgcaaaaccctaacagggagttggcagcggattcacttaagttttgtggagcaacaaagacggtattgagactctcaacagtaccggaaataacggcggtgtcgtagccaaataataaaccacctaatgtagcgactaaggtaatgctaaatatataactggaattatactgggtattcattcagacctgccttagaccattctgatcttttatcagtgcattgatgttggaattgtcaggcagttaaggcaattatcattttttacaatgcgtttacgtaatgtcttttctgtgatcttaattgtgataattatccaaaattgataaaaacaatactattgccgtgactcagagcacgaaagagaattatcgtaagtgggaaaacaaataacgtaaaaataataagctctatgatggaaatattaaccggcgaacgattcagattgcagacgaaagaaaaaaaggcgctccgtggagcgccgaataacagtcacaagttgggataacgtaagttgagggtgcagcggcataacattggcagaacaacatctttaacctttcacaccacctgccgtcaggccgttgaccagccagcgttgagccagcaagaagacgatggtgatcggtaatgcagacatcacggcagcggcggcaaagtcaccccacaggtagttttgcgggttgaggtattgctgcatccccacggccagggtgtagctgtttacgtcacgcagtaacaggctcgcgaccggaacttcagtaatggcagcgataaagctcaggatgaataccaccgccagaatcggtacactcagcggcaacaggacaaggcggaaggcctgccacggtgtcgcaccatccagcgcagcagcttcttccaggctactgtcgatggtttcgaaatagcctttgatggtccagacatgcagcgcaatcccacccagatacgcgaaaattacgccgccgtgagtattcaggccaatgaatggaatgtactcacccagacgatcaaacaacgcatacaacgcgaccagactaagtactgccgggaacatctggaaaatcagcattcctttcagcagcgtcgctttgcctggaaagcgcatacgggcgaaagcgtaggcgcaggtggtggagagcgccacaatgccaatcgcggaaatcccggcgacctttacgctgttccacagccacagcagtaccgggaatggcggtggcgtaatgcgaccatcagcctgttcaacgctaaaacctaacgccagtttccagtgatcccaggagatttgctccgggatcaggctgccggtcgcaaagtttccctgacgcaggctgatagcgacgaccatcagcagcgggaacataatcgctgcgataaaaagtagcagtagcaggtgagtaataaataaacgagctttttggcttttcggttggaccattgccatttttgttatctcccttaatcaaacttcattcgcgtggctttcaggttcactatcgccagcgcacccaccagcaggaagatcagcgtggcaattgctgccgccagaccgaagtcctgacccccgccgccttcaaaagcgatgcggtaggtgtagttaacaagcaggtcggtataaccggctggcgtggtcgtgccaagacgatccgggccgccgttggttaacagttgaatcagcacgaagttgttaaagttaaaggcgaagctggcgatcatcagcggcgtcagcggtttaatcagcagcggcagcgtaatcttaaagaagttctggaacggacctgcgccatccattgcactggcttcatacaaatcgtccggaatcgctttcagcaagcccatgcagaggatcatcatgtacggataacccagccaggtattgacgataattagcatcgtgcgggcggtggtcggatcgctgaaccaggcgggcttcacgccaaacagcgcgctcaacatcatgttgatttcaccgaagctctggttaaacaaccctttgaaaatcaagatactaatgaagcttggcaccgcgtagggcagaatcagcaggacgcgatagaccgctttgccgcgcaacgcttcccactgcaccagacacgccagaaccatgccgaccgccaccgttaaaaagacagtgatcaggctgaacaccacggtccagacgaaaatggcgaggaacggtttctgaatgccttcgtcggtaaagacgcgggtaaagtttttccagccggtggtcacggtgtaaccggggcttagcttttcatcaccccagttgccgtcggcggtaatggactggtaaaagccaatttggttattcggacgatatttcacgccgctctgattattcgtcaacgtgccgtcaccgtcgagtgtgtagagcggctgcgtgccagaaaactggcgcagggagctcatcatcactttgttgccatccggcagaatggcggtaatgtcactcagcgcctgacgattctgggtaatcacgcgcagattcgcgcgttcgccttcgggctgggcggtcgtttctttcagttgcagtttttgctcgccgccaaatttaaaagcgtcggagaggtaatttttgccggtttcgccgtcgctgagcgccagttgccactcatcgcccgccgggtaaagaccaaagttataggttttgcctgcttgccaggagcgatctaacaacacttcctgcgcacgttcaaaagtcagctggttagtgctgctgtagttggtgaaggcaatggcgatggtgcagaccagagggaagaggacgaataatcccattccagccattcccgggtaaacatagcgccaggcgtaggctttacgattggcgaaaatatacagccccgcactactcaatatcagcgtggtaatggcgaacaggtattccccttgtgcgtacattaaaacaacaaggtaacccaccagcaggccgagcagacctagcacactccatttcagcgcgtcgctttgccaccaatgtttctttttaatgacatccatggggttcttcctcattccaggacggataaggctttcacgccttatccgacaacaactgcctgatgcgacgctgacgcgtcttatcaggcctacatacgtttcggttttgtaggccggacaaggcgttcacgccgcatccggcatttcacagcattacttggtgatacgagtctgcgcgtctttcagggcttcatcgacagtctgacgaccgctggcggcgttgatcaccgcagtacgcacggcataccagaaagcggacatctgcgggatgttcggcatgatttcacctttctgggcgttttccatggtggcggcaatacgtggatctttcgccaactcttcctcgtaagacttcagcgctacggcacccagcggtttgtctttattaaccgcttccagaccttcatcagtcagcagatagttttcgaggaactctttcgccagctctttgttcggactggcggcgttaatacctgcgctcagcacgccaacgaacggtttggatggttgacccttgaaggtcggcagtaccgttacaccataattcactttgctggtgtcgatgttggaccatgcccacgggccgttgatggtcatcgctgtttcgcctttattaaaggcagcttctgcgatggagtaatcggtgtctgcattcatgtgtttgtttttaatcaggtcaaccaggaaggtcagacccgctttcgcgccagcgttatccacgcccacgtctttaatgtcgtacttgccgttttcatacttgaacgcataacccccgtcagcagcaatcagcggccaggtgaagtacggttcttgcaggttgaacatcagcgcgctcttacctttcgctttcagttctttatccagcgccgggatctcttcccaggtttttggcgggttcggcagcagatctttgttataaatcaggcttaacgcttcaacagcgatcgggtaagcaatcagcttgccgttgtaacgtacggcatcccaggtaaacggatacagcttgtcctggaacgctttgtccggggtgatttcagccaacaggccagattgagcgtagccaccaaagcggtcgtgtgcccagaagataatgtcagggccatcgccagttgccgcaacctgtgggaatttctcttccagtttatccggatgctcaacggtgactttaattccggtatctttctcgaatttcttaccgacttcagcgagaccgttatagcctttatcgccgttaatccagattaccagtttaccttcttcgattttggcgagagcgctggcggaaaacatcatcgtcgttaatgcggataatgcgaggatgcgtgcacctgtttttattttcataatctatggtccttgttggtgaagtgctcgtgaaaacacctaaacggactctagtttctttatacggcaacctctttccatcctccttgcccctacgccccaccgtcgctttgtgtgatctctgttacagaattggcggtaatgtggagatgcgcacataaaatcgccacgatttttgcaagcaacatcacgaaattccttacatgacctcggtttagttcacagaagccgtgttctcatcctcccgcctcctcccccataaaaaagccagggggtggaggatttaagccatctcctgatgacgcatagtcagcccatcatgaatgttgctgtcgatgacaggttgttacaaagggagaagggcatggcgagcgtacagctgcaaaatgtaacgaaagcctggggcgaggtcgtggtaagcaaagatatcaatctcgatatccatgaaggtgaattcgtggtgtttgtcggaccgtctggctgcggtaaaagcactttactgcgcatgattgccgggcttgagacgatcaccagcggcgacctgttcatcggtgagaaacggatgaatgacactccgccagcagaacgcggcgttggtatggtgtttcagtcttacgcgctctatccccacctgagtgtagcagaaaacatgagttttggcctgaaactggctggcgcaaaaaaagaggtgattaaccaacgcgttaaccaggtggcggaagtgctacaactggcgcatttgctggatcgcaaaccgaaagcgctctccggtggtcagcgtcagcgtgtggcgattggccgtacgctggtggccgagccaagcgtatttttgctcgatgaaccgctctccaacctcgatgctgcactgcgtgtgcaaatgcgtatcgaaatctcccgtctgcataaacgcctgggccgcacaatgatttacgtcacccacgatcaggtcgaagcgatgacgctggccgacaaaatcgtggtgctggacgccggtcgcgtggcgcaggttgggaaaccgctggagctgtaccactatccggcagaccgttttgtcgccggatttatcggtagcccaaagatgaacttcctgccggtaaaagtgaccgccaccgcaatcgatcaagtgcaggtggagctgccgatgccaaatcgtcagcaagtctggctgccagttgaaagccgtgatgtccaggttggagccaatatgagcctgggtattcgcccggaacatctactgccgagtgatatcgctgacgtcatccttgagggtgaagttcaggtcgtcgagcaactcggcaacgaaactcaaatccatatccagatcccttccattcgtcaaaacctggtgtaccgccagaacgacgtggtgttggtagaagaaggtgccacattcgctatcggcctgccgccagagcgttgccatctgttccgtgaggatggcactgcatgtcgtcgactgcataaggagccgggcgtttaagcaccccacaaaacacacaaagcctgtcacaggtgatgtgaaaaaagaaaagcaatgactcaggagatagaatgatgattactctgcgcaaacttcctctggcggttgccgtcgcagcgggcgtaatgtctgctcaggcaatggctgttgatttccacggctatgcacgttccggtattggttggacaggtagcggcggtgaacaacagtgtttccagactaccggtgctcaaagtaaataccgtcttggcaacgaatgtgaaacttatgctgaattaaaattgggtcaggaagtgtggaaagagggcgataagagcttctatttcgacactaacgtggcctattccgtcgcacaacagaatgactgggaagctaccgatccggccttccgtgaagcaaacgtgcagggtaaaaacctgatcgaatggctgccaggctccaccatctgggcaggtaagcgcttctaccaacgtcatgacgttcatatgatcgacttctactactgggatatttctggtcctggtgccggtctggaaaacatcgatgttggcttcggtaaactctctctggcagcaacccgctcctctgaagctggtggttcttcctctttcgccagcaacaatatttatgactataccaacgaaaccgcgaacgacgttttcgatgtgcgtttagcgcagatggaaatcaacccgggcggcacattagaactgggtgtcgactacggtcgtgccaacttgcgtgataactatcgtctggttgatggcgcaagcaaagacggctggttattcactgctgaacatactcagagtgtcctgaagggctttaacaagtttgttgttcagtacgctactgacagcatgaccagccagggtaaagggctgagccagggttctggcgttgcatttgataacgaaaaatttgcctacaatatcaacaacaacggtcacatgctgcgtatcctcgaccacggtgcgatctccatgggcgacaactgggacatgatgtacgtgggtatgtaccaggatatcaactgggataacgacaacggcaccaagtggtggaccgtcggtattcgcccgatgtacaagtggacgccaatcatgagcaccgtgatggaaatcggctacgacaacgtcgaatcccagcgcaccggcgacaagaacaatcagtacaaaattaccctcgcacaacaatggcaggctggcgacagcatctggagtcgcccggctattcgtgtcttcgcaacctacgccaagtgggatgagaaatggggttacgactacaccggtaacgctgataacaacgcgaacttcggcaaagccgttcctgctgatttcaacggcggcagcttcggtcgtggcgacagcgacgagtggaccttcggtgcccagatggaaatctggtggtaatagcaaaacctgggccggataaggcgtttacgccgcattcggcaaccaacgcctgatgcgacgcttgcgcgtcttatcaggcctacaacggctgtcaaatgtaggccggataaggcgtttacgccgcatccggcataaaaacaggttgtcattatctgaaaggggcgaaagcccctctgattatcgggtttagcgcgctattgcctggctaccgctgagctccagattttgaggtgaaaacaatgaaaatgaataaaagtctcatcgtcctctgtttaagtgcagggttactggcaagcgcgcctggaattagccttgccgatgttaactacgtaccgcaaaacaccagcgacgcgccagccattccatctgctgcgctgcaacaactcacctggacaccggtcgatcaatctaaaacccagaccacccaactggcgaccggcggccaacaactgaacgttcccggcatcagtggtccggttgctgcgtacagcgtcccggcaaacattggcgaactgaccctgacgctgaccagcgaagtgaacaaacaaaccagcgtttttgcgccgaacgtgctgattcttgatcagaacatgaccccaagtgccttcttccccagcagttatttcacctaccaggaaccaggcgtgatgagtgcagatcggctggaaggcgttatgcgcctgacaccggcgttggggcagcaaaaactttatgttctggtctttaccacggaaaaagatctccagcagacgacccaactgctcgacccggctaaagcctatgccaagggcgtcggtaacagcatcccggatatccccgatccggttgctcgtcataccaccgatggcttactgaaactgaaagtgaaaacgaactccagctccagcgtgttggtaggacctttatttggttcttccgctccagctccggttacggtaggtaacacggcggcaccagctgtggctgcacccgctccggcaccggtgaagaaaagcgagccgatgctcaacgacacggaaagttattttaataccgcgatcaaaaacgctgtcgcgaaaggtgatgttgataaggcgttaaaactgcttgatgaagctgaacgcctgggaagcacatctgcccgttccacctttatcagcagtgtaaaaggcaaggggtaattacgccccacagtgctgattttgcaacaactggtgcgtctcctggcgcacctttttttatgcttccttcctgggatatgagcgattttttatagtaactcacttcttcttcactaagaatatccattatctcaatgccttatcagagattcttttcctttcgccggtagtgtctggacattcaggctacttttccaggttattttatttctgttatgcagaggttttatgataagtcatatcctaaattctggcggcaataactctttgatgaaacatgatgtggtgcaaggaaataatatagtagatcttgatttactacgtaatttaaatggggtgccaggtttaaacagagataactttatttatatcagcaatattttttcaaatataaaacaacggaacgaaaaaatcatgcaataaatatgtttcgtgaagtctcaatcagtaatgatactataagtgtaaaattctacagaaatgaaaaaaattgaatgcgcttgcaattttctgatggataaagatgcgcaggggtatatcgacctgtctgatttggatttaacaagttgtcattttaaaggtgacgttataagcaaggtgtcttttttaagtagtaatctacaacatgtaacattcgaatgtaaagaaattggggattgcaattttactactgcaatagttgataatgtcatatttagatgtcgacgtttacacaatgtgatttttatcaaagcgagtggtgaatgtgtcgatttcagcaaaaatattcttgatacagttgacttcagccagagtcaacttggtcatagtaattttcgcgaatgtcagattagaaatagtaacttcgataattgttatctttacgctagccacttcaccagagcagagtttctgtctgccaaagaaataagttttattaaaagcaatttgacagctgttatgtttgattatgtgcgaatgagcacagggaattttaaagattgcattacagaacaattggaattaactattgattatagtgatatattttggaatgaagatctcgatggttatatcaataacattataaaaatgattgatacattgccagataatgcaatgatattgaaatccgttctggccgtaaaactggtgatgcaattaaaaatacttaatattgttaataaaaactttattgagaatatgaagaaaatatttagccattgtccttatataaaagatcccattatacgcagttatatccattctgatgaagataacaagttcgatgattttatgcgtcaacatcgattcagtgaggtgaatttcgatacccaacagatgatcgattttattaacagatttaatacgaataaatggctaattgataaaaataacaatttttttatccaacttatcgatcaggccttacgaagtacggatgatatgatcaaagcaaatgtttggcatctttataaagagtggattcgtagtgatgatgttagtcctatatttatagaaactgaagataatttaagaacctttaacacgaatgaattaacacgaaacgataatatctttatcctgttctccagtgtcgatgatgggccagttatggtggtaagctcccagcgcttacatgatatgttgaatcctacaaaagataccaattggaattccacgtatatctacaaatccagacatgagatgttgcctgttaatcttactcaggaaacacttttcagctccaaatctcatggtaaatatgcgcttttccccatttttactgcgagttggcgagctcatcgtataatgaataagggtgtttaagtaaaggaaaacatcaccgttcctggcatcctggacggtgatgcccctacggttgccctcgccagcacgggcatcggtaaagcgtaaggttcaacatcgttttaccacttcatgcgattgttgcgtttttgttgcgtattagatcacttaatttgctttacatctcccgtaaacacttttctgcgatacaatgcctttacgttatgtaacggagagttcggcatgagtcaccccgcgttaacgcaactgcgtgcgctgcgctattgtaaagagatccctgccctggatccgcaactgctcgactggctgttgctggaggattccatgacaaaacgttttgaacagcagggaaaaacggtaagcgtgacgatgatccgcgaagggtttgtcgagcagaatgaaatccccgaagaactgccgctgctgccgaaagagtctcgttactggttacgtgaaattttgttatgtgccgatggtgaaccgtggcttgccggtcgtaccgtcgttcctgtgagtacgttaagcgggccggagctggcgttacaaaaattgggtaaaacgccgttaggacgctatctgttcacaagtagcacattaacccgggactttattgagataggccgtgatgccgggctgtgggggcgacgttcccgcctgcgattaagcggtaaaccgctgttgctaacagaactgtttttaccggcgagtccgttgtactaagaggaaaaaaatatggagtggagtctgacgcagaataagctgctggcgtttcatcgcttaatgcgtacggataagccaattggcgcgttactgctgctctggccaacattatgggcgttgtgggtggcgacaccgggcgttccccagctctggatcctggcggtgtttgtcgcgggtgtctggctgatgcgcgctgccggatgtgtggtgaatgattatgctgaccgcaagtttgatggtcatgttaagcgcacggcgaaccgaccacttcccagcggcgcggtaacagagaaagaggcgcgcgcgctgtttgtcgtgctggtactgattagctttttactggtgctgacgctgaatacgatgaccattctgttgagcattgccgcgctagcgctggcgtgggtgtacccgtttatgaagcggtatacccatctaccgcaagtggtgctgggcgcggcgtttggctggagcattccaatggcttttgccgctgtgagtgagagcgtgccattgagttgctggttaatgttcctcgccaatattctctgggcggtggcttacgacacgcagtatgcgatggttgaccgcgatgatgatgtgaagattggcattaaatccacggcaatcctgttcggccaatacgataaattgattattggtattttgcagattggcgtactggcactgatggcgatcatcggtgagttaaatggcttaggctggggatattactggagtattctggtggctggcgcgctgtttgtttatcaacaaaaactgattgccaaccgcgagcgtgaagcctgctttaaagcatttatgaataataactatgttggtctggtactatttttagggctggcaatgagttactggcatttctgatgatgtaaaaaagccggatgatcatccggctttcttctgggttgcctgatgcgcggcgcttctcaggcctacacaacacatcgcaatttattgaatttgcagattatggaaggccggataaggcgttttcgccgcatccggcaattctctctgattacccttcgccctgcgtcgcactctcaatcgtcaaacgcacgtcacttgtaatcaactccgccagcaactgataaaccttcatcgtttctgccggttcggcatcgccgctatcgctgatatacccttcatcacgcagtgtcagcaccagagaactgaacaccgccttgtcgaagaactccggcgcgttgatgccgtgcagcacggagagacgttgcgcgacggtgcggctctctttctccagcgtaccgcggttgatgctcgggttggcactcaacaaccagaaggtgatggcataacgttgcagcgtttcgcgcgcgcctgcggccagcagctgtagcgtgcgagaatgcgccgggttgatatgcaactcatcatcttgcagggtaatcagcccctgacgttgcatctcatttgccagcgcatcaataacgtccggcaactcgtcgcgatcccagcgcaggaacagctccgctttcagcattgggtaaagcacattgacgtgctccatcaatacgtcgcgggagatgtggcgatgctgggtgacgattgccgccatcaggctaggcagcaccaacatatgcgcaatgttgttgcgatagtaggtcatcagcaccgcttgctcgcgcggcagaatgatgatgtcgccgattgtgtctttctcgacttcaaacttgttcatttgcagcgcgtgatcgataagctcgctggcgctggcactaggaacggtagagtccgtggagtagggcacgttgcgcatcagatccaggtagcagttgagttgctcggttaactgctcgcgggtgagactgcgctgacgacttgccagtagcgcagtacagcacaggttcatggcgtttgccgcgcctgcgttgttaatgcgtaccatcagatcggcagcaatattattgaccgtcggcgttaaccatgccggacgcaccgcttcgatgggatcgatagattcacgccagtcaggtacatgctggttaaggtaggtcatcaacggcattggttcaccgaagttgacgtaaccctgaccgagattacgcagcttgcttaaaccgcgcagcatctgcggcaggctctctttctctttcgtcgcgccgcgcagttctttggcgtaagtacccacttccatgacgtgctcataaccgatatagatcggaatcagcgtaatcggacgcgtgccgccacgcagcatcgcctgaatggtcatgctcagcgtaccagttttcggatccagcaaacgccccgtacgggaacgaccgccttccacgaagtactcgacggaataaccacggctgaacagttcgccgagatactcccggaaaacggtggaataaagtttattgcctttaaacgtacggcgaataaagaacgcccccagacggcggaaaatcggcccggcaggccagaaattcaggttgatcccggcggcgatatgcggcggcaccagcccctggtgatacagcacgtaagaaagcagcaggtagtccatgtgactgcggtggcaaggcacatataccagctcatgaccgtcgtgggccagctggcgaacgcgctcagcgttatggacgttgatgccctggtaaagtcggttccaggtgaagcccagaatacggtcagtcaggcgaatcatctcgtaagagaaattcgccgcaatctcttccatcagtgcaatcgcgttctgctgcgctttttcatgggagatttttttgctgcgcgcttcatcttctaccgctttggcaatggcgcgggaggcgagcagcttattaaacagatcctgacgagcaggcaaacgtgggcctacggcagccagacgttgacgggcaaagtgcatacgcgccacgcgcgccagtttctgagcgatagttttatccgtgccgtgttcatccgccatacggcgcaggctaacactcgggctgaaacgcacaaaactgtcgcgaccgagccacagtacagcgaaaaatttctgtacgccgttaagcatacgcagcggcgggttcacttcgcctttttcacgccccggcgcgcgaccaaacatcacgctcactggcaccatctgcacatccagatttgggttgctacggtgcaaatcgagatagtcgtggaacagcttaatagactcttctttcggcgtgtaataggtgaacacacgcggcccgccgtgaatgaacacatagcgcggcagtagcgtgccgtcgatttccagcggctctaacgggtcaggcaagtcatgtgccagacactgggcgcgcaacgtcagcaaatctgctttgctgttgtacggtaaaacgtacataattggacgagaggtatccagccccagttccggggcaggatctgccggaatagacttgctttttaccaggatgcttaatggtaaattcagtaatttgtagtaaattcgtggccagccggacataaacgatgtaaagcctctggttaataatgcaaatgcgcggcaaggatagcagaaagtcatgggaaattctgtggtatccgctcatgtttcgcgcggcgctacgcaaacccgaatcatcggatttaacggtacactgatattgacgctcataatgtaaaaaggttctttcaatggccaataataccactggattcacccgaattatcaaagctgctggctattcctggaaaggtttacgcgctgcatggatcaacgaagcggcattccgtcaggaaggcgtagcggtattgttggcggtggtcatcgcctgctggctggatgtggacgcgattacccgcgtgctgcttatcagctccgtgatgctggtgatgattgtggaaatcctcaatagcgccatcgaagcagtggttgaccgaattggctctgaataccatgagctttccggacgcgcaaaagatatgggatccgctgcggtgctgattgccattatcgtcgccgtgattacctggtgcattctgttatggagccattttggataacccttccagaattcgataaatctctggtttattgtgcagtttatggttccaaaatcgccttttgctgtatatactcacagcataactgtatatacacccagggggcggaatgaaagcgttaacggccaggcaacaagaggtgtttgatctcatccgtgatcacatcagccagacaggtatgccgccgacgcgtgcggaaatcgcgcagcgtttggggttccgttccccaaacgcggctgaagaacatctgaaggcgctggcacgcaaaggcgttattgaaattgtttccggcgcaagtcgcgggattcgtctgttgcaggaagaggaagaagggttgccgctggtaggtcgtgtggctgccggtgaaccacttctggcgcaacagcatattgaaggtcattatcaggtcgatccttccttattcaagccgaatgctgatttcctgctgcgcgtcagcgggatgagcatgaaagatatcggcattatggatggtgacttgctggcagtgcataaaactcaggatgtacgtaacggtcaggtcgttgtcgcacgtattgatgacgaagttaccgttaagcgcctgaaaaaacagggcaataaagtcgaactgttgccagaaaatagcgagtttaaaccaattgtcgttgaccttcgtcagcagagcttcaccattgaagggctggcggttggggttattcgcaacggcgactggctgtaacatatctctgagaccgcgatgccgcctggcgtcgcggtttgttttagttctctcttcatcaggcttgtctgcatggcattcctcactagttctgataaagcactctggcatctcgccttacccatgattttctccaatatcaccgttccgttgctgggactggtcgatacggcggtaattggtcatcttgatagcccggtttatttgggcggcgtggcggttggtgcaacggcgaccagctttctctttatgctgttgctgtttttacgcatgagcaccaccgggctgactgcgcaggcttatggtgccaaaaatcctcaggcattagcccgtacgctggtgcaaccgttgctgttggcgttgggggctggggcgttaattgcgctgctgcgtacgccgattatcgatctggcgctgcatattgttggcggtagtgaggcagtcctggaacaggcgcggcgctttcttgaaatccgctggttaagcgcaccggcgagcctggcgaatctggtattactcggttggttactcggcgtgcaatatgcccgtgcgccagtaattttgttagtggtcggcaatatcctcaacattgtgctggatgtctggctggtgatggggctgcatatgaacgtgcagggcgcggcgctggcgacggttattgcggaatatgcaacattgctgattggtctgctaatggtgcgtaaaatcctcaaactacgcggaatttccggcgaaatgctgaaaactgcctggcgaggaaacttccgtcgcttgctggcgcttaaccgcgatatcatgctgcgtagcctgttgttgcaactctgtttcggcgcgatcaccgtacttggcgcgcgactggggagtgacattatcgctgttaacgcggttctgatgacgctactcacctttaccgcctatgcgctggatggttttgcctacgcggttgaagcgcactccggtcaggcatacggtgcgcgcgacggtagccagttgctggatgtctggcgggcagcgtgccgccagagcgggatcgtagcgttactgtttagcgtggtttatttgctggctggggaacacatcattgcgttactgacgagcttaacccagattcagcagctggctgaccgctatcttatctggcaggtgattttgccggtggttggcgtctggtgttatctgctggacggcatgtttataggcgcaacgcgtgccaccgaaatgcgtaacagtatggcggtggccgccgcaggttttgcgctgacgctccttacgctgccgtggctgggtaatcatgctttgtggctggcattaaccgtctttctggcgttgcgcgggctttctctggcggctatctggcggcgtcactggcgcaatggtacctggtttgccgcaacgtgacggttaaaaattctgaataaataatcctaagccaaattgctgactacacttaatctcacgttcagaagaaaagtgaacgtactctcattcacaacctaacgatgaggtcttgattatgaataaagatgaagccggcggtaactggaaacagtttaaaggtaaagtgaaagagcaatggggcaaactgaccgatgatgatatgacgatcattgaaggtaaacgtgatcaactggtcggtaaaatccaggaacgttatggttatcagaaagatcaggcagaaaaagaggtcgtggattgggaaacccgcaatgaatatcgctggtaattaatccctcctgcccgacgtgtacaaggatgtacgccctcttaacgcggtttctttttcacctgcacagagtgatcatgctggcactgttcaggatgacgacacgcttccacttctacacatgccgcacagagcccatgtgcttcaatcacattatgccgcagggcaaaccccatttttgccgccagcgtatgcataatgtcttccacgccttctgcacactcttctttcactgcgccgcagcgatcgcaaataaacatggcactcgtatgggtgggctgatcgaacagatgacagagcacataactgttggtggattccaccttatgcacaaaaccttgctcaagcagaaaatccagcgcgcgataaaccgttggcggcttggcttgcggttcagcttcgcgcagtaaatcaagcagatcataagcgctgatagcgccatcctgcagactcatcaggcgcaacacttccaggcgctgtggggtcaggcgcacattacgctgcgcgcagattttttcagcctgcgctaataactcctgcgttgtggtcttttccatcgggcacctcaaagtgggggttaagaatgtccttactttaccatgttccaggaaaaacaccgagaacccttattgttgccgtaatgttgattttctgttttgtaggtaaggtgttatgttgccttgtcgtaccattatcaacacgataataattaataattcatttttaaataaattgcttcaagttaactcgctatttatttaactgggtttaaacgcatacctgtagttcagaaattatgagcgatttttgatagtgaccagatggcaaaagaattataaggaggacacggtacgacaaaaaaggtagatgaatcatgttgaagataatacccggtgcaactggatactttaataaaacactcaatagtaatcaattcgataatgaagatgcaatcaaagataaattagataatagaggtagtatcaaaggtaaattaaataatatatatggtaaatctattgattatgcagcgctgcgtcatcgggatataattattgcaaaaatagatttgtttattcaacgaatcacgcataatttatggcatgcacgtaaaaaaatgtgtttttaattgtgcaaataaatgatctcaaaatgtgggtcaataagtatattgacgattgcactgatgaggatttaaacgatcgtgactttattgcaagtgttgttgaccgggctatttttcatttcgcgattaatagtatatgtaatcctggggataataaagatgcaatgcccattgaacaatgtacttttgatgtagaaactaagaatgaccttccctccacggttcagctattttatgaggaatctaaggataatgaacctttagcgaatatacattttcaagcaataggttctggttttttaacgtttgttaatgcctgccaggaacatgatgacaacagcttaaaattatttgctagcctgttaattagtcttagttattctagtgcctacgcagatttaagtgaaacagtgtatattaatgaaaataatgagagctacctgaaagctcagtttgaaaaattatctcaacgtgatatgaagaagtacctgggagagatgaagcgtctggctgatgggggagaaatgaattttgatggctatctggataagatgagtcatctggtgaatgaaggaacgctcgatcctgatattttaagcaaaatgcgagatgctgcaccacaattaattagcttcgcgaagagctttgacccaaccagtaaggaagagattaaaatacttacagacacttctaaattaatttatgatttgttcggggttaaaagcgagaaataatatgtgaagttcttcgatagtatggaaggcattatataaaaggacccaatatttattgggttcttttttctctatcaatactattagcagggagatatatcaccagagtttaatgtgtgattttttatttatcgtcgaacctggattgtttatcattggccttaacaaagttaacggctaataagattatttccatcacttcgtgagagcttcatgccttgagaggatctcaattttcttttgcaatgagacaggcgcttcctgttgttatggtatagtaccccgctattgagcctcctgaatagtgatgctgaataacataaccccatgatatatcgataaaataatctctacatttgaaaatgcacggtaattctgaaatgcaaaaaatcaaccaaaccagcgcaatgcctgaaaaaactgacgttcactggagtggtcggtttagcgttgcaccaatgctcgactggacggacagacattgccgctatttcttgcgtctgctttcccgcaatacgttgctgtataccgaaatggtgaccacaggggcgattattcacggtaaaggtgattatctggcgtacagtgaagaagaacatccggtagcgttgcaactgggcggtagcgatccggcggcgctggcgcagtgtgcaaagctggcagaagcgcgcggatatgatgagatcaacctgaatgtcggctgcccgtctgaccgggtgcagaacggcatgtttggtgcgtgtctgatgggtaatgcgcagctggttgccgactgcgtgaaagcgatgcgcgatgtggtgagcattccggtgacggtgaaaacgcgtattggcatcgacgaccaggacagctatgaatttctctgcgatttcatcaataccgtttccggcaaaggcgagtgtgagatgttcatcatccacgcacgtaaagcctggcttagcgggttaagcccgaaagaaaaccgtgaaatcccgccgctcgattatccgcgtgtgtatcaactgaagcgtgactttccgcatctgacaatgagcattaacggtggtatcaagagcctggaagaggccaaagcacacctgcaacatatggatggcgtgatggtcgggcgcgaggcgtatcagaatccgggtattctggcggcggtagaccgggagatctttggttccagcgataccgatgccgatccggtggcggtagtgcgcgccatgtatccgtacattgagcgtgaactcagccaggggacgtatctcggccatattacccggcatatgttgggcttgttccagggtattcctggcgcgcggcagtggcggcgttatttaagtgaaaatgcccataaagcgggtgcagacattaatgtgctggaacacgcgctcaaactggtggcggataagcgttaacttttcaccaaaaagtagtcaaattcaccacgccctgcgcaccgtcgcggggcgttttgctgttaaatcaatagattatttttggcatgattcttgtaatgccagcaagagatttcatatttgggagagcatcatgctggaactactttttgtgattggcttttttgtcatgctgatggtcaccggcgttagcttgctgggcattatcgccgcgctggttgtggcgacggccattatgttcctcggcggtatgctggcattgatgattaagttgctgccgtggttactactggcgattgcggtggtgtgggttattaaggcgattaaagcaccaaaagtgccgaaatatcagcgttatgaccgctggcgttactaagggattgtgcggatgatcacaacctaaggttttatccttagaacaaaataggaattgataatcaaatctgtcactattgcgcctctaacagattcatcgtgctgtaccctacatacagccgaactataaaaagaaagggcttcccaggtggaagccctatttcttttatggaatcagcaggctggaaccttgcgtcgcccggctttccagaatctcatgcgcacgctgcgcatccttcagcggatatttctgctgctcggcgacatcgaccttaatcacaccgctggcaatcaaagagaacagttcattactggcctcggttaattcctcccgcgtggtgatatagccttgcagggaagggcgtgtcacatacaagctgcctttttgattgagaatgcctaagttcacaccggtaaccgcaccactactgttgccaaaactgaccattaagccgcggcgttgcaggcaatccaggctccgttcccaggtgtctctgcccacggaatcgtacaccacgcgcactttcttaccgccggtgatctcttttaaccgctcgaccagatcctcttcacgatagttaataacctgccacgcgcccgcttttagcgcgctctgcgctttttgcgcggttcctacggtgccgataagtttcgcgcccagggcttttgcccactggcaggcaattaagccaacgccgccagccgctgcgtggaacaggaactgttcatcgggtttaatttcataggttttgcgcagcagataataaaccgttaagcctttcaggaaggatgccgcagcttgctcaaaagaaattgccgcaggcagaatcgccgctttatccgcaataatgttatgcacagagctgtaagcgcctaacgcgctctgcgcatagactacacgatcgcctgccttaatatgctttacaccactgccgactttactcacgatgcctgctgcttcggtgcctaatccgctgggtaggcttggcggcgggtaaaggccgctgcggatatatgtgtcgataaaattgatgccgatggctttattttcgacctggatttcattctccgccggatcggcaggagtgaactctacggcttgaagtacttccgggccaccgtgcttgtgaaattcaattcgtgttgccatgtgtcctccagaacgtatcgtcagggtctgcttcatatgataaagtttcgacccattctttatctcggtaactccattcactatggcaggaaataaacccttcaacaaacagcaggctgaaccccgcgaacgcgatccacaagttgccgggctgaaagtgcctccgcacagcatcgaagcggagcagagcgtgttgggcggtttaatgctagataacgaacgctgggatgatgtagccgagcgtgtggtagcagacgatttttacacccgcccacaccgtcatatctttactgaaatggcgcgtttgcaggaaagcggtagccctatcgatctgattactcttgcggaaagcctggaacgccaggggcaactcgatagcgtcggtggttttgcttatctggcagagctgagtaaaaatacgccaagtgcggctaacatcagtgcctatgcggacatcgtgcgtgaacgtgccgttgtccgtgagatgatcagcgttgcgaatgagattgccgaagctggttttgatccgcaggggcgtaccagcgaagatctgctggatctggctgaatcccgcgtctttaaaattgccgaaagtcgtgcgaacaaagacgaagggccgaagaacatcgccgatgtgctcgacgcaaccgtggcgcgtattgagcagttgtttcagcagccacacgatggcgttaccggggtaaacaccggttatgacgatctcaacaaaaaaaccgctggcttgcagccgagcgatttgatcatcgtcgccgcgcgtccgagcatgggtaaaacaacatttgcgatgaacctcgtcgaaaacgcggcgatgttgcaggataaaccggtacttatcttcagcctggagatgccaagtgaacagatcatgatgcgttctctggcgagcctgagccgcgttgaccagactaaaatccgtaccgggcagctcgatgacgaagactgggcgcgcatttccggcaccatgggtattttgctcgaaaaacgcaatatctatatcgatgactcctccggcctgacgccaacggaagtgcgttcccgcgcacgccgtattgcccgtgaacacggcggcatcgggcttatcatgatcgactacctgcaactgatgcgcgtaccggcgctttccgataaccgtacgctggaaattgcagaaatctctcgcagcctgaaagcactggcgaaagaactgaacgtgccggtggtggcgctgtcccagttgaaccgttctctggaacaacgtgccgacaaacgcccggtcaactccgacctgcgtgaatctggctctatcgagcaggatgcggacttgatcatgtttatctatcgtgatgaggtgtatcacgaaaacagtgatttaaaaggcatcgcggaaattattatcggtaaacaacgtaacggcccaatcgggacggtacgcctgacctttaacggtcaatggagccgcttcgacaactatgcggggccgcagtacgacgacgaataataattattttatgaattaggtaattaaagcaaacacttatcaaggaacacaaatgcaagcggcaactgttgtgattaaccgccgcgctctgcgacacaacctgcaacgtcttcgtgaactggcccctgccagtaaaatggttgcggtggtgaaagcgaacgcttatggtcacggtcttcttgagaccgcgcgaacgctccccgatgctgacgcctttggcgtagcccgtctcgaagaagctctgcgactgcgtgcggggggaatcaccaaacctgtactgttactcgaaggcttttttgatgccagagatctgccgacgatttctgcgcaacattttcataccgccgtgcataacgaagaacagctggctgcgctggaagaggctagcctggacgagccggttaccgtctggatgaaactcgataccggtatgcaccgtctgggcgtaaggccggaacaggctgaggcgttttatcatcgcctgacccagtgcaaaaacgttcgtcagccggtgaatatcgtcagccattttgcgcgcgcggatgaaccaaaatgtggcgcaaccgagaaacaactcgctatctttaataccttttgcgaaggcaaacctggtcaacgttccattgccgcgagcggtggcattctgctgtggccacagagccattttgactgggtgcgcccgggcatcattctttatggcgtcagcccgctggaagatcgctccaccggtgccgattttggctgtcagccagtgatgagtctaacctccagcctgattgccgtgcgtgagcataaagccggagagcctgttggttatggtggaacctgggtaagcgaacgtgatacccgtcttggcgtagtcgcgatgggctatggcgatggttatccgcgcgccgcgccgtccggtacgccagtgctggtgaacggtcgcgaagtaccgattgtcgggcgcgtggcgatggatatgatctgcgtagacttaggtccacaggcgcaggacaaagccggggatccggtcattttatggggcgaaggtttgcccgtagaacgtatcgctgaaatgacgaaagtaagcgcttacgaacttattacgcgcctgactagtagggtcgcgatgaaatacgtggattaatcgttctgtaatatttgattgtctgtgccggatgcggcgtgaatgccttatccggccaataaaatcctaaaaattcaataagttgatgttctttcatgctcttataaaggtcgtgcctctggcggatgtacgtttgtcatgagtctcactctgttgctaattgccgttcgctcctgaacatccactcgatcttcgccttcttccggtttattgtgttttaaccacctgcccgtaaacctggagaaccatcgcgtgtttcaaaaagttgacgcctacgctggcgacccgattcttacgcttatggagcgttttaaagaagaccctcgcagcgacaaagtgaatttaagtatcggtctgtactacaacgaagacggaattattccacaactgcaagccgtggcggaggcggaagcgcgcctgaatgcgcagcctcatggcgctagcctttatttaccgatggaagggcttaactgctatcgccatgccattgcgccgctgctgtttggtgcggaccatccggtactgaaacaacagcgcgtagcaaccattcaaacccttggcggctccggggcattgaaagtgggcgcggatttcctgaaacgctacttcccggaaagtggcgtctgggtcagcgatcctacctgggaaaaccacgtagcaatattcgccggggctggattcgaagtgagtacttacccctggtatgacgaagcgactaacggcgtgcgctttaatgacctgttggcgacgctgaaaacattacctgcccgcagtattgtgttgctgcatccatgttgccacaacccaacgggtgccgatctcactaatgatcagtgggatgcggtgattgaaattctcaaagcccgcgagcttattccattcctcgatattgcctatcaaggatttggtgccggtatggaagaggatgcctacgctattcgcgccattgccagcgctggattacccgctctggtgagcaatagcttcagcaaaattttctccctttacggcgagcgcgtcggcggactttctgttatgtgtgaagatgccgaagccgctggccgcgtactggggcaattgaaagcaacagttcgccgcaactactccagcccgccgaattttggtgcgcaggtggtggctgcagtgctgaatgacgaggcattgaaagccagctggctggcggaagtagaagagatgcgtactcgcattctggcaatgcgtcaggaattggtgaaggtattaagcacagagatgccagaacgcaatttcgattatctgcttaatcagcgcggcatgttcagttataccggtttaagtgccgctcaggttgaccgactacgtgaagaatttggtgtctatctcatcgccagcggtcgcatgtgtgtcgccgggttaaatacggcaaatgtacaacgtgtggcaaaggcgtttgctgcggtgatgtaatgcaggaaagcaggctggagctacccagcctgcagtgaaattaaactgtcgtcgctttcactctttctttatagatgatttttttgatgccatcgttctacgtgagagataataaacgttgttagttcttttattgttaagcttatcccaattatctggaattccttatcctgtttttttgggtggagtaataatttctgcacatctaaccattattaaatttaataataagtatcgggtttgttacgatagaatatttctatatcctcaagaatatgctttgccttattgcctgtgactttctgagattcaattatagtatcgttaaattctaatgttaaagagaactcttttttccgctttgtgtaagtttaaccttatattgattaccaatatcaaataaaaaggtcctgtaatgagaataatcacctttaacctcctcggcaaaacagcaaagcgtgcaaatatacataaagtctttcttacccctgattttgttaactaaatcaataaatgcgtgaaaaactttacttgcaatagaacttgatacttcttctccaggtctaaaaaatcttttgcaatttttaactgtgtttctatgtataaaaagaaatctttggcataagagatatctttattatttagtgcatctagctcaacaggtaaagatgtcgttttgttgctattcacatatgatatattcatatcatcatctccatcgcgagtaataaaattaatcaccattgtagggtagggggctggtcaatcagaaatcatctttataaacttcgattgtttttgtaatgctgtatcattaagttcattaaatcgtacagcagataaatgttctatcaaatttcgctcatttgccgaggattcatcataataaacgtaaaattaatgtatccttacatcgagtaataaacattttttatacaaaaaaagacaggaacgtatttactgggttaaatataatcatcctgcttttcatcacaaaaaccgcagataatccttcctttccccggcagctggcgttatggtcagatggtttttgcaacaaatctcacaataaaaagtttcaacatactgactatttagggaaaaatatgcgcaagatcacacaggcaatcagtgccgtttgcttattgttcgctctaaacagttccgctgttgccctggccagttctcctagtccgcttaaccctgggactaacgttgccaggcttgctgaacaggcacccattcattgggttagcgtcgcacaaattgaaaatagcctcgcagggcgtccgccaatggcggtggggtttgatatcgatgacacggtacttttttccagtccgggcttctggcgcggcaaaaaaaccttcagcccagaaagcgaagattatctgaaaaatcctgtgttctgggaaaaaatgaacaatggctgggatgaattcagcattccaaaagaggtcgctcgccagctgattgatatgcatgtacgccgcggtgacgcgatcttctttgtgactggtcgtagcccgacgaaaacagaaacggttagtaaaacgctggcggataattttcatattcctgccaccaacatgaatccggtgatctttgcgggcgataaaccagggcaaaatacaaaaagccaatggctgcaggataaaaatatccgaattttttatggcgattctgataatgatattaccgccgcacgcgatgtcggcgctcgtggtatccgcattctgcgcgcctccaactctacctacaaacccttgccacaagcgggtgcgtttggtgaagaggtgatcgtcaatagtgaatactgacagagcgggagagcgtgatgctctcccgaatgctgtttttttaatcacacctttatcctttcgctgtcttgctgcaaactgattaagagagttttatcaaggagcagcacatgtggtatcaaaagacgctcacgcttagcgccaaatctcgtgggtttcatctggtaacggatgaaattctgaatcagctggctgatatgccgcgcgttaacatcggcttactgcatctgttgctgcaacatacctccgcctctctgacacttaatgagaactgcgatcccaccgtacgccacgacatggagcgttttttcctccgcaccgttcccgacaacggaaattatgagcatgactatgagggagcagacgatatgccttctcatatcaaatccagtatgctgggaacaagccttgtattgccggtgcataaagggcgtattcagaccggcacctggcaaggcatttggctgggggaacatcgcatccacggcggaagccgtcgcatcatcgcgacactacaaggggagtaaaaaatgaccattagcgagttgctacaatattgcatggcaaaaccaggcgcagaacagagcgtgcataatgactggaaagcgacgcagatcaaagtggaagatgtactgtttgcgatggtgaaagaagtagaaaatcgcccagctgttagcctgaaaaccagcccggagctggcggagctgctacgtcagcagcacagcgatgtgcgtccaagccgccatctgaataaagcgcactggagcaccgtgtatctcgacggtagcctgccagatagccaaatctattatctggtggatgcgtcttatcagcaggcggtgaatttactgccggaagaaaaacgtaaattgctggtgcaactctgaaaggaaaaggccgctcagaaagcggccttaacgattacagcatcggcttaaggaagcgtgccgtgtgacttgcttcgcactccgcgacggtttctggcgtaccggagacgaggatctcgccgccaccactgccgccttctggtcccaggtcgacaatccagtcagcggttttgatcacgtcgagattgtgctcaatcaccacaatggtgttgccctgatcgcgcagtttatgcagtacgtcgagcagttgctgaatatcggcgaagtgcagaccggtggtcggctcgtcgagaatatacagcgtctgcccggtgccgcgtttactcagttcacgcgccagcttcacgcgctgggcttcaccgccactaagggtggttgcggactgccccagtcgaatgtacgtcaggccaacgtccatcaacgtttgcagcttacgcgccagtgcaggtacggcatcaaagaactcacgcgcctcttcgatggtcatatccagcacttcgtggatggttttgcctttgtacttaatctccagcgtttcacggttatagcgtttacctttgcactggtcgcacggcacgtagatatccggcaggaagtgcatctccactttgatcacgccatcgccctgacaggcctcgcagcgtccgccacgaacgttaaagctgaaacgtcccggcgtatagccgcgcgcacgggattccggtacgcccgcaaacagttcgcgcacaggcgtaaacacgccggtataggtcgccgggttagaacgtggagtacgaccaattgggctttggtcgatatcgatcactttatcgaaatgctccagcccctgaatatcgcgatacggtgctggttcggcgatggtcgccccattcaactggcgttgggcaatcgggaacagtgtgtcgttaatcagcgtgcttttaccggaaccactaaccccggtgatgcaggtaaacagacccaccggcagcgtcagcgtcacgtccttcaggttgttgccgcgtgcgcctgtcagcttcagcactttttccggattcgccggaacgcgtttcttcggcacttcaatcttgcgtttgccgctcatgtactgcccggtcaagctctccggcaccgccataatcgcttccagcggaccttctgcgaccacttcaccgccgtgaacacctgcgcccgggccaatgtcgatcacatggtcagcggcgcgaattgcgtcttcgtcgtgctccaccacaatcacggtattaccgagatcgcgcagatggataagcgtacccaacaggcgctcgttatcacgctggtgcaggccgatagacggctcgtccagcacgtacataacgccaaccaggcccgcaccaatctggctcgccagacggatacgctgtgcttcaccgccagaaagcgtttctgcgctgcgggaaagcgtcaggtaattcaggccgacgttaacgaggaatttcagacgatcgccgatctctttaaggattttttctgcaatcttcgcccgctgacctgcgagtttgagattgttgaagaattccatcgcatgaccaatgctcatgtcggagatagcaggcagcggcgtattctcgacatacacgtggcgcgcttcccgacgcagacgcgtcccttcgcagctggcgcacggacgattactgataaacttggctaattcttcgcgtaccgcgctggattccgtctctttatagcggcgctccatattatgcagcacgccttcgaacggatgacgacgaatggaggtatcgccacgatcgttcatgtatttgaattcaatgttttctttgccagaaccgtacaacaccactttatgcacgttcgcgctcaggctgccccacggcgcttcgacgtcgaacttatagtgatctgccaggcttttcagcatctggaaataatagaagttgcggcgatcccagccacggatcgcaccaccagccaggctcagttccggattctggatcactcgatcaggatcgaaatattgctgtacgccaaggccgtcgcaggtcgggcaggcccccgccgggttgttaaagctaaacagtcgcggctccagttcacgcatactgtagccgcaaattgggcaggcgaagttggcggagaacagcagctcttccgctttcgggtcgtccatatccgccactaccgcggtaccaccggaaagctccagcgcggtttcaaaactctcggcaagacgttgggtaagatcgtcacgcaccttgaagcgatcaaccaccacttcaatggtatgtttcttttgcagttccagttttggcggatcggaaagatcgcagacttcgccatcaatacgagcacggatgtagccctggcttgccaggttctccagcgttttggtgtgttcgcctttgcgctctttaatgattggcgcgagtagcatcagacgcttgccttccggctggctcagcacgttatccaccatctggctgacggtttgcgccgccagcgggacgtcgtggtccggacagcgcggctcgccaacgcgggcgaataacaaacgcaaatagtcgtggatttcggtgattgtccccaccgtagaacgcgggttatgagacgtgcttttctgctcaatactgatggcaggagaaagcccctcaatatgatcgacgtccggcttttccatcagactcagaaactgccgcgcgtaggcggaaagggattcaacgtaacggcgctgcccttcggcatataaggtgtcgaaagcgaggctggatttgccagaaccgctaagcccggtcacgacaatgagcttgtcgcgggggataacgaggttgatgtttttgagattatgggtgcgggcgccccgaacttcgatcttatccattcacctttcccggattaaacgcttttttgcccggtggcatggtgctaccggcgatcacaaacggttaattatgacacaaattgacctgaatgaatatacagtattggaatgcattacccggagtgttgtgtaacaatgtctggccaggtttgtttcccggaaccgaggtcacaacatagtaaaagcgctattggtaatggtacaatcgcgcgtttacacttattcagaacgatttttttcaggagacacgaacatggccagcagaggcgtaaacaaggttattctcgttggtaatctgggtcaggacccggaagtacgctacatgccaaatggtggcgcagttgccaacattacgctggctacttccgaatcctggcgtgataaagcgaccggcgagatgaaagaacagactgaatggcaccgcgttgtgctgttcggcaaactggcagaagtggcgagcgaatatctgcgtaaaggttctcaggtttatatcgaaggtcagctgcgtacccgtaaatggaccgatcaatccggtcaggatcgctacaccacagaagtcgtggtgaacgttggcggcaccatgcagatgctgggtggtcgtcagggtggtggcgctccggcaggtggcaatatcggtggtggtcagccgcagggcggttggggtcagcctcagcagccgcagggtggcaatcagttcagcggcggcgcgcagtctcgcccgcagcagtccgctccggcagcgccgtctaacgagccgccgatggactttgatgatgacattccgttctgatttgtcattaaaacaataggttatattgttttaaggtggatgattaaagcatctgccagccataaaaaagaagcctccgttatggaggcttctacgtatcaggtcaaaatcattggccattgtggcggtgtctgattcatctcttctatcatcacgctctcgatgttgtgccagatagcggtgatgtccgccattgtgatgccaagcaaccccattgcgaaccaacaggcggaaacaacgcccagaccgctgctgatcaccgcaagcccgacataatcagaccgacgaaaacggatgttgagtgtgctggccagaaacatcattacggcactaagaagttgccagcgaagaagaaccacgccagtggtgagggtagccatcaaacaattcctctgaaaagagccgatgccctggacagcgcggcgttgttcacgggaggcgtggtacactctggctatcgcggggcttgcagaacacaaaaatgaaacactctgtttgtttcattaattttgtgaactatatcacaattgattgtttgttagccatattaggccgtgacttttattgctgtacagattatgtggtttttcagtggcattaagggcatatcttcccgccgcctctgcattcctgtaggaaattaattttgaatatcaatgaattattttcatccaggtgacgattagaaaggtatcaatttcaaatcaggcaaaagtgctatttataccgtaagatttatctaaagacgtcggtacccagggttttcaccttgcaatggccgggtataaacaggcaggaaattgatagcaatgagtcatcgtgcacgacaccaattactggcgttgccgggcattatctttttagttctctttcccatcattcttagcctatggattgccttcctttgggcaaaaagtgaagtgaataatcagctccgaacctttgctcaactggcactggataaatccgagctggtcattcgccaggcagatttagtgagcgatgcagctgaacgctatcaggggcaagtttgcactccagcccatcaaaagcgaatgttgaatattattcgtggctatctttatattaatgaattgatctatgcccgtgataaccattttttatgcagtagcctgatagcgcctgtaaacggctatacgattgcaccggccgattataagcgtgaacctaacgtttctatctattattaccgcgatacgccttttttctctggctataaaatgacctatatgcagcggggaaattatgtggcggttatcaaccctctcttctggagtgaagtgatgtctgatgacccgacattgcaatggggtgtgtatgatacggtgacgaaaacctttttcagcttaagcaaagaggccagcgcagcaacgttttctccgctgattcatttgaaggatttaaccgtacaaagaaatggctatttatatgcgacagtttatagcacaaaacgcccaattgcagccattgttgcgactagttatcaacgtcttataacccatttttataatcatcttatttttgcgttgcccgccggtattttggggagtcttgttctgctattactctggctacgtattcgacaaaactatttatctcccaaacgtaaattgcaacgcgccctcgaaaaacatcaactttgtctttattaccagccaataatcgatatcaaaacagaaaaatgtatcggcgctgaagcgttgttacgttggcctggtgagcaggggcaaataatgaatccggcagagtttattccgctggcagaaaaggaggggatgatagaacagataactgattatgttattgataatgtcttccgcgatctgggcgattacctggcaacacatgcagatcgctatgtttctattaacctgagcgcctccgattttcatacgagtcggttgatagcgcgaatcaatcagaaaacagagcaatacgcggtgcgtccgcagcaaattaaatttgaagtgactgagcatgcatttcttgatgttgacaaaatgacgccgattattctggctttccgccaggcaggttacgaagtggcaattgatgattttggtattggctactctaacttgcataaccttaaaagtttgaatgtcgatattttgaaaatcgacaaaagctttgttgaaacgctgaccacccacaaaaccagtcatttgattgcggaacacatcatcgagctggcgcacagcctggggttaaaaacgatcgctgaaggcgtcgaaactgaggagcaggttaactggctgcgcaaacgcggcgtgcgctattgccagggatggttctttgcgaaggcgatgccgccgcaggtgtttatgcaatggatggagcaattacccgcgcgggagttaacgcgcgggcaataaaattacaggcggtggcgataatcgctgggagtgcgatcaaactgccgacggaaaacgcgggagaaggtctgctggctgacataacccaggtccattgcgatatcaaaaatcggacgctcggtggtgcgcaactcaacggcggccagtaacaggcggcgttggcgaatgtaatcgccaagcgtctgatgcgtcaccgtgcggaacattcgttgcaagtaccacttactatagccacttttttttgcgactacatcaatgttaagcggctggtcaatatgctcgtcaatccatgcgataagatcctgaataattttctgatgggacataaatctgcctcttttcagtgttcagttcgttaattcatctgttggggagtataattcctcaagttaacttgaggtaaagcgatttatggaaaagaaattaccccgcattaaagcgctgctaacccccggcgaagtggcgaaacgcagcggtgtggcggtaagcgcgctgcatttctatgaaagtaaagggttgattaccagtatccgtaacagcggcaatcagcggcgatataaacgtgatgtgttgcgatatgttgcaattatcaaaattgctcagcgtattggcattccgctggcgaccattggtgaagcgtttggcgtgttgcccgaagggcatacgttaagtgcgaaagagtggaaacagcttagctcccaatggcgagaagagttggatcggcgcattcataccttagtggcgctgcgtgacgaactggacggatgtattggttgtggctgccttagccgcagtgattgcccgttgcgtaacccgggcgaccgcttaggagaagaaggtaccggcgcacgcttgctggaagatgaacaaaactaaagcgccacaagggcgctttagtttgttttccggtctttgtctttctctctatcccgctggtacacaggagggtttcccccgacgtcaacacacctcattcgagcacgtggtggaggttccggttggtgttgatgctttaattgtatgtcaccgacgtttcttcgccagtgtaaaagtatactttttaaccgcaatatttttgtcatctcagacgattttttatcgcaatcctgaacggtatacggctcgataacgctgcaatcttgcgcaccgacgataacgtttgcgcatcaattgcctggtttttcatcgtcaagacaataaaagagaaaaaagcagcaaacttcggttgaaaaagccgctatgatcgccggataatcgtttgctttttttaccacccgttttgtatgcgcggagctaaacgtttgcttttttgcgacgcagcaaattgtcgcaaacctggagcaggaagataacgtttcgctggcaggggattgtccgccacgcatcttgacgaaaattaaactctcaggggatgttttcttatgtctacgccaagtgcgcgtaccggcggtagtctcgacgcctggtttaaaattagtcaacgtggaagcactgtccgtcaggaagtggttgccgggttaacaacgtttctggcgatggtctacagcgtcatcgtcgttccaggtatgttgggtaaagcaggcttcccgcctgcggcagttttcgttgcaacctgtctggttgccggactcggttctatcgtgatgggtctgtgggctaatctgccgttggcgattggttgcgccatctccctgacagcgtttaccgcattcagcctggtgctggggcaacatattagcgtacctgtcgcgctgggtgccgtgttcctgatgggtgtgctgtttacggtaatttctgccacgggtatccgtagctggattttgcgcaacttgcctcacggtgtggcgcacggcacggggattggtatcggtctgttcctgctgctcattgccgctaacggtgtcggtctggtgattaaaaacccgcttgatggtctgcccgttgcgctgggtgatttcgcgaccttcccggtgattatgagtctggtaggtctggcggtgatcatcggcctggaaaaactgaaagtccctggtggcattctgctgaccattatcggtatcagtattgtcggtttgatcttcgatcctaacgtccatttctccggcgttttcgccatgcctagtttgagcgatgaaaacggcaatagtctgattggcagcctggacattatgggcgcgctgaatcctgtagtcctgccaagcgttctggcgctggtgatgacggcagtatttgatgccaccggaactatccgtgccgtcgccggccaggcgaacctgctggataaagatgggcagatcatcgacggtgggaaagcactgaccactgactccatgagcagcgttttctctggcctggtgggtgcggctccggcagcggtatacatcgagtctgcggcgggtacggcggcgggcggtaaaaccggtttgacggctatcaccgttggcgtgctgttcctcctgattctgttcctctctccgctctcttacctcgttccggggtatgcaacggctccggcgctgatgtacgttggcctgctgatgctgagcaacgtggcgaaaatcgactttgctgattttgttgatgcgatggcgggtctggttacggctgtattcatcgtgctgacctgtaacatcgtaacaggcatcatgatcggcttcgcgactctggtgattggtcgtctggtttccggcgaatggcgcaagttgaacatcggtacggtcgttatcgccgtggcgctggtgaccttctatgcgggtggctgggctatctaatctttcatcggattctgaaaacgggtggcaatggctgcccgtttttattttctccgcacattgtgtgagcttttgcgatattctgaaaaaaatgagaattcaggcataacgtctttctcagatcataaaaaacatcgcaaacagggaacgcatggaaatcttcttcaccatactgataatgaccctcgtggtcagcctgtccggggtggtcactcgtgtcatgccctttcagatcccgcttccgcttatgcaaatcgccatcggtgcgctactggcgtggccgacgtttggtttgcatgtggagtttgatcctgaactctttttagtcttgtttatcccgccgttgctgttcgctgatggctggaaaacgccgacccgtgaatttctcgaacatggtcgagagattttcggcctcgcgctggcgctggtggtggtcaccgtggtcggcattggcttccttatttactgggtggtgccgggcattccgctgatccctgcctttgcgctggcggcggtgctttctccgaccgatgctgtggcgctctccgggattgttggcgaagggcgcatcccgaaaaaaatcatgggcattttgcagggcgaagcgttgatgaatgacgcctccggtctggtgagcttgaagtttgccgtagcagtggcgatggggacgatgatcttcaccgtcggcggtgcgacggtcgaatttatgaaagtagccattggcggtattctcgccggttttgtggtgagctggctgtacggtcgcagcctgcgattcctcagccgctggggcggtgatgaacccgcgacgcagatcgtcctgctgttcctgctgccattcgcttcttatctgattgccgaacatattggcgtttccggcatcctcgctgcggttgccgccgggatgaccatcacccgctccggtgtgatgcgccgtgcgccgctggcaatgcgcctgcgtgcaaacagcacctgggcgatgctggaatttgtctttaacggcatggtgttcctgctgttaggtctgcagctgccgggtattctggagacgagcctgatggcagcagaaatcgaccctaacgtcgaaatctggatgctgtttaccaatattattctgatatatgcggcgctgatgctggtccgtttcggctggctgtggacgatgaaaaagttcagcaaccgcttcctgaagaagaagccgatggagtttggtagctggaccacacgagaaatcctgatcgcgtctttcgccggggtgcgtggggcgatcactctggccggtgtgctctctatcccgctgctcttgccggatggtaacgtcttcccggcgcgctatgagctggtgttcctggcggctggcgtcattctcttcagcctgtttgtcggcgtggtgatgttgcctattctgctacaacacattgaagtcgcggatcatagccaacaattgaaagaggaacgtattgcgcgagcggcaacggcagaagtggcgattgtggcgatccagaaaatggaggagcgtctggcggcggataccgaagagaatatcgataaccagctgcttacggaggtcagttctcgcgtcattggtaacctgcgtcgtcgcgccgatggacgtaacgacgttgaaagttccgtgcaggaagagaaccttgagcgtcgcttccgtctggcggcattgcgttctgaacgtgctgaactttaccacctgcgcgccacacgggagatcagcaacgaaacgctgcaaaaattactgcacgatctcgatttgcttgaagcgttgctaattgaggaaaatcagtaagccgaaagcgacgtaaccaggcccgaggtaatctgaaaaaggtgcaatcttttgcacctttaacaggttagctcgggctaacattcatgattctaaaacaaataaattatctctcttttaaagtcaattcattggctgttcttcgacttaacctcaatctgcatcttgcataatatctgcagtaatcttcatagcgactgcatgaagattatcctcagtttgactcatgccagtatgagtggcacaatcttcttcaaagaatttctgtagtgttaccaggatatcactattaatggagatattttcctcaccacggagaatggtaatacccattccctggacgctagcctcatcgaaattaacacgatagagacggatattaaacatccaggcttttgttaaaacagaacagttgaaatggcaattgcttaaattggcattattaaaattaacattagccatattagagtcggtacatataaccatttcgaggaacgtatttgttaaccgcgtaaaaaagagtttgctatcaattaagtttatattctggagggttgctttattcaggttgacacgagacagatcagcatgttcaaagttaattaaatcaagtttagagaagctaaggtcggctctaaataaattaatatatggcgctattactttataaagatttacctcagccatgtatgccatataaaaattactataatcaaggaaggtatttttaatattggctctattcattgttgcattgtagaattgaacatgcatagcggaacaactatttagagttccgtcagtcatttttatctgagcgaaattactgtcatcgagaatacaattatcaaaaagtattttttccattatggcgaaattaaaattcgttttatacatattacagtcctgaaaaatagcgttttgtagtctgcaacctgcaaaattgctattggataaatcttcatctttaatcacgatacctttcaggctaaggtgactaaaatcgtaaccaccatttactgtctgtgggatttcgatagtattattatggacggtgacattatttataaaatataccaccttaatactcacttccttatctttattaaggtaaactcttctcgtaattctatcgtcacatttattatttgcatgactagctatatctataaaatatttatgtattttcctgtccgtttctttcgtgatttttccacttggtaaactatcataaattcttttcattttctgaatcaagcctatcactttttcatgatcatccattttgaaaagagagagggctttattgtcaattaacgtgtttttatgatgtttgctgtaattatcactttttgttttctttgtatgacttggacttgtgacagagtggttatcgttaatcaggcaaagagggaaaaacatattatttaaaccattatagcgcataaaatatccttataattaacaagaaagaaaaggcatattctctgcattatcattttctacgactgtcaaaaatcgctcattttttaatgagtttatttgtttaatattatgggaaaaggtgatgcatttgggagaggaagagtattccccggtcagacgaccggggaaggggagagattaatgcgcgcggccttgctcaacgccaaagccggtctgggagcggataaactgcgcgcggaacagttcacgctcacgcgcgccttccgcactgttatcggttgcgctgaagaaccagatgccgaggaatgccacggtgatagagaacagcgccgggtattcatacgggaagatggctttttcgtgaccaaggatctgtacccaaatcgtcgggccgaggatcatcagtactactgcggtaatcagccccagccagccacccatcatcgcgccacgcgtggtcagtttgctccagtacatagaaagcagaatgatcgggaagttacagctcgccgcgatggcaaacgccagccccaccataaaggcgatgttctgattctcaaacagcacgccgaggataatcgcaatcacgccgaggatcagtacggtgattttacttacccgcagctcttcacgttcggtcgcgccttttttgaagacgttagcgtacaagtcatggctaaccgcggatgcgcccgccagcgtcagacccgcaaccaccgcgaggatagtggcgaaagcaaccgcactaataaaaccgaggaacaggttgccgcccactgcattcgccaggtgaacggccgccatgttgttaccaccaatcagatggcccgccgcgtctttatattccggattcgcaccaaccagcatgatcgcgccgaagccgataataaaggtcagaatatagaagtagcccataaacccggtggcgtagaacacgctcttacgtgcttcgcgggcatcgctgactgtaaagaagcgcatcagaatgtgcggcaagcccgccgtaccaaacatcagtcccagacccagagagagcgcggagatcggatctttcaccagcccgcccggcttcatgatgtcgacacctttcgggtgtaccgccatcgcttcactgaacagattgttgaagctaaagccgacgtgtttcatcaccataaaggccataaagctggcaccgaacagcaacagcacggctttgataatttgcacccaggtggtcgccagcatgccgccgaacaggacgtacatcatcatcagcacgccgaccagcaccaccgcaatgtgatagttaaggccaaacagcagctcgatcagtttacctgcgcccaccatctgggcgataaggtaaagcgccaccaccaccagagaaccacaggcgctaagaatacgaatcggcccttgtttcagacggtaagaggccacatcggcaaaggtgtagcgccccaggttacgcagacgttcggcaatcaggaacaaaatgatcggccagcccaccaggaagcccaggctgtaaattaagccgtcatagccggaggtaaacaccagcgcggagatccccaagaaactggcggcggacatatagtccccggcaatcgccagcccgttctggaagccagtgatattgccgcctgcggtgtagtagtcgctacgagaacgtacgcgtttacttgcccagtaggtaatgccgagcgtaaacacgacgaaaatcaggaacataataatcgcctgccagttcgttggctggcgctctacggccccgctaatagcatccgcggcgttagctgcgaaagggagtgtggcggcaagcgccgtcagaactcttttcatgatgcttgtacctcatgcagttatttcaacttgcttgtacctcatgcaggacttcattattaagacggtcgaattcgccgttcgcccgccagatgtagataccggtgagaacaaaggagatcacaatcactccaacaccaattggaataccgcgtgtgacgctggtgttcggattcagcggcgtgcccagccagccgggcgcgaaggcgatcagtaaaataaagccgatataaactgccagcataataatgctcaggatggtggcaaaccgttgccgtttttcgactaactccctgaaatgcgcattgtcttctatccgctgataaatagtgccattcatcacagattctccagaggtaatgtagggattgttttaattcccgctcccttatgggagaaggttaacgctcgggtaacccttgccgaatgtaggccggataaggcgtttacgccgcatccggcaatcaatgcctgatgcgacgctgtcgcgtcttatcaggcctacaaaccgttaccgactcgcatcgggcaattgtgggttagcttggcatcgcgatagcctgcttctcttcaagcagcttctcgactacgccaggatcggcaagcgtgctggtatcgcccaggttgctggtatcgcccgccgcaattttgcgcagaatacggcgcataattttgccggagcgggttttaggcagggagtcggtccagtgcagcacgtctggcgtcgccagcgggccaatctctttacgcacccagttgcggacttctgcgtacagttctggactcggttcctccccgtgattaagcgtgacgtaggcgtagatcgcctgacctttaatattgtgcggaatacctactacggcggcttcggcaatcttcggatgcgccaccagcgcgctctcaatctctgccgtccccagacggtgaccggagacgttcagcacgtcgtccacacgcccggttatccagtaatagccatcttcatcgcgacgcgcgccgtcgccgctgaaatacatatttttgaaggtggagaagtaggtctgttcaaaacgttcgtgatcgccaaacagcgtacgcgcctgacccggccaggagtcggtgattaccaggctaccttcggtggccccctccagcgggttaccttcgttatcgaccagcgccggttgcacgccgaagaacggacgtgttgcgctaccggctttcagctcggtagcgccaggcagcggggtgatcatgaaaccgccggtttcggtctgccaccaggtatcgaccaccggacatttctcgttgccgatttttttccagtaccactcccacgcttccgggttaattggctcgcccacggaaccgagaatgcgcaggctgctacggtcggtgccttcgatcgctttatcgccttccgccatcagcgcgcggatcgccgtgggtgcggtatagagaatattgacctgatgcttgtccaccacctgcgccatacgggcaggcgtcggccagttgggtacgccttcaaacatcagcgtggtcgcaccgcaggccagcgggccgtacagcaagtaactgtgtccggtcacccagcccacatcggcggtgcaccagtagatatcacccggatgataatcaaagacatatttaaaggtcagcgccgcgtacaccagataaccgccggtagtatgcagcacaccttttggcttaccggtagaaccggaggtgtagagaataaacagcggatcttcggcgttcatctcttccgcctggtgctgatcgctcgcttgctcaaccaggtcgtgccaccacaggtcgcgcccttcctgccagtcaattttcccgccagtacgcttcagtaccaccacatgctctacgctggtgacgttcgggtttttcagcgcgtcatcaacgtttttcttcagcggaatactgcgcccggcacgcacaccttcgtcggaagtgatcaccagtcgactgttggaatcaataatgcgcccggcaacggcttccgggctgaagccgccgaaaatcacgctatgcaccgcgccaatgcgggcgcaggccagcatcgcaaccgcggcttccggcaccatcggcatataaatcgccaccacatcaccttttttaatgcccagctcgagcagggtattggcgaagcggcagacgtcgcggtgcagctctttatagctgatatgtttgctctggctggcgtcgtcgccttcccagatgatggcggtacgatcgccgttttcttgcagatggcggtcaaggcagtttgccgccagattcagcgtgccgtcctcgtaccatttaatggacacattaccgggggcaaaggaggtgtttttcaccttctggtaaggtttgatccagtcaagaatttttccctgttcgccccagaaggtatcaggtacgttaatagattgttgatacatcgcctcgtactgctgagggtttatcaggcaacggtctgcgatgttggcaggaatggtgtgtttgtgaatttggctcatgcttttgttctccttgtaggatgttaataatatgtggcataagcgttaaatgtaggggtattggcagttttgtttagtatttgggcgacagatcacgcaaaagtagaattgtgcaaataaacggcagggtaatttttgaaggtcagcaacaaaagttgattaattctttgaggaacatgcagttatgcatgctgttgaaaaagaggaagatactgactaactctaaagtggtattttacatgcacttacaattgattaaagacaacattcacagtgtggttatttgttacacataggggcgagcaatgtcatgacagtgtaggtgcggttactgtcgtgaaaaacaataaaaaccgccattgcaacaatggcgcaattcggatgaagcccctatgacaaggataaaaataaacgcacgccgtatcttcagcttattgattccttttttctttttcacttctgttcacgctgaacaaacggctgctcccgcaaaacctgtaactgtggaagcgaagaatgaaacctttgccccgcagcatcccgatcaatatctctcctggaaagccaccagcgaacagagtgagcgtgttgacgccctggcggaagatccacggctggtgatcctgtgggcggggtatcccttcagccgcgattacaacaagccgcgtggacatgcttttgctgtgaccgatgtgcgtgaaaccctgcgtaccggtgcgccgaaaaacgctgaagatggtccgctaccgatggcatgctggagttgtaaaagcccggatgtggcgcgtctgatccagaaagacggcgaagatggctacttccacggtaaatgggcgcgcggcggtccggaaatcgtcaacaacttaggttgtgccgattgccataacaccgcctctccagagttcgccaaaggcaaaccggagttaaccctttcccgtccgtatgcggctcgcgcgatggaagccattggtaaaccttttgagaaagccggacgtttcgaccagcaaagcatggtttgcggtcagtgccatgtggagtattacttcgacggcaaaaacaaagcggttaaattcccgtgggatgacggcatgaaagtcgaaaatatggagcagtattacgacaaaattgccttctctgactggactaactccctgagcaaaacgccaatgctgaaagcgcagcacccggaatatgaaacctggacagcgggcattcacggtaaaaacaacgtgacctgtatcgactgccatatgccaaaagtgcagaacgccgaaggcaaactctacaccgaccataaaattggtaatccgtttgataacttcgcccagacttgtgcgaactgccatacccaggacaaagctgccttgcaaaaagtggtcgcggaacgtaagcagagcattaacgacctgaaaatcaaggttgaagatcaactggttcacgctcacttcgaagcgaaagcagcgctggatgcaggcgcgacggaagctgaaatgaagccaattcaggacgatatccgtcatgcccagtggcgctgggatctggcgatcgcttcccacggcattcatatgcacgcaccggaagaaggtttacggatgctcggtacggcgatggataaagcggcggatgcacgcaccaaactggcgcgcctgctggcgaccaaaggcatcacccatgaaatccagatcccggatatcagtaccaaagagaaagcccagcaggccattggcctgaacatggaacaaatcaaggccgagaagcaggacttcatcaaaacggtgatcccgcagtgggaagaacaggcacgtaaaaacggtctgttaagccaataaccccgttccgcctcgcaaggggcggaaaacacaatggagtgaatatgagcgtattacgtagcttattaactgccggggtgctggcgagcggcctgttgtggagcctgaacggaattaccgctacccctgcggcgcaggcatctgatgatcgctacgaagttacccagcagcgtaacccggatgccgcctgtctggactgtcataaaccagataccgaaggtatgcatggaaaacatgcttccgttatcaacccgaataacaaactgccggtcacctgcaccaactgtcacggccagccaagtccgcaacaccgcgaaggggtgaaagatgtgatgcgctttaacgagccgatgtacaaggttggagagcagaacagcgtctgtatgtcctgtcatctgccggaacagttgcaaaaagcgttctggccgcacgatgtccacgtaaccaaagtggcgtgcgccagctgccattccctgcatccacagcaagatacgatgcagacgttaagtgacaaaggacggattaagatttgcgtcgattgccacagcgatcagcgcaccaatccgaactttaacccggcgtctgttccgttgcttaaggagcagccatgacctggtctcgtcgccagtttctcaccggcgtcggcgtgctggcagccgtcagcggcaccgcagggcgcgtggtggcgaaaacgttgaatatcaatggggtgcgttacggcatggtgcatgacgagagcttatgcatcggctgtaccgcctgtatggatgcttgtcgggaagtgaacaaggtgccggaaggcgtcagccgcctgacgattattcgtagcgagccgcagggcgaatttcctgatgtgaaatatcgcttcttccgtaagtcttgccagcactgcgatcatgcgccgtgcgttgacgtctgcccgaccggtgcgtcttttcgcgatgctgccagtgggattgtcgatgttaatccggatctctgcgtcggttgtcagtactgcatcgccgcctgtccgtaccgcgtgcgctttatccatccggtcacgaagacggcggacaaatgcgatttctgccgtaagaccaatttgcaggccggtaagttgcccgcgtgcgttgaagcttgcccgaccaaggcgctgacgtttggcaatctggacgatcccaacagtgagattagccaactgctgcgccagaagcccacttaccgctacaagctggcgctgggaaccaaaccgaagctgtaccgcgtaccgtttaaatacggggaggtgagccaatgacgcagacttccgcatttcattttgaaagcctggtgtgggactggccgattgccatctacctgtttttgattggtatttctgctggtctggtgacgctggccgtgctgttacgtcgcttctacccgcaggcgggcggtgcagacagtacgttgctgcgcaccacgctgattgtcgggccgggcgcggtgatcctcggtctgttgatcctcgtcttccacctgacaagaccgtggaccttctggaagctgatgttccactacagttttaccagcgtgatgagcatgggggtgatgctgtttcagctctacatggtggtgctggtgctgtggctggcgaaaatctttgaacatgatttgcttgccctgcaacaacgctggttgccgaagctggggatcgtgcaaaaggttctgagcctgctgacgcccgttcatcgcggactggaaacattgatgctggtgctggcggtgttgttgggggcttataccggctttctgctgagcgcgctgaaaagctatccgttcctcaataacccgatcctgccggtgctgttcctcttctccggcatcagctccggtgcggcggtggcgctgatcgccatggcgatacgccaacgcagtaacccgcattccacggaagcgcagtttgtacaccgtatggaaatccctgtggtatggggtgaaatcttcctgctggtggcgttttttgtcggtctggcgctgggcgatgacggtaaagttcgtgcgctggtggcggcattaggtggcggtttctggacgtggtggttctggcttggtgtcgccgggctggggctgattgtgccaatgctgctcaaaccgtgggtcaatcgcagttccggcattcctgccgtgctggcggcgtgtggggccagtctggtcggcgtgttgatgctgcgctttttcattctctacgccggacagttgacggtggcgtaagccagaaaagaggtggtttctggacgtattccttcctgaagtcggttttctggcgttgttgttaagtctcggggtcaacgtgttgaccccgttgacggccttcgcgggagtgcggttgcgctggcctgccatgatgcgactcacttgcatcggcattctggcgcagttcgcgctcctgctgctcgcctttggcgtactgacgtattgttttctcatcagcgatttcagcgtcatttatgtcgcgcaacatagctatagcctgctgagctgggaactcaagctggcagcggtgtggggcggccatgaaggtagcctgctgctttgggtgctgctgctttccgcctggagcgcgctgtttgcctggcattatcggcagcaaaccgatccgctatttccgctgacgttagccgttttatctctcatgctcgccgcactgctactgtttgtggtgctgtggtccgatcccttcgtgcggatatttccaccagcaatcgaaggccgcgatctcaatccgatgctgcaacatcccggtcttatctttcatccaccgctgctttaccttggctatggcggtttgatggtagcggcgagcgtggcgctggcgagtctactgcgcggcgagtttgatggtgcctgcgcccgaatttgctggcgctgggcgttacctggctggagtgcattaacggcggggatcatcctcggttcctggtgggcctactgcgaactcggctggggcggctggtggttctgggatccggtggaaaacgcctctttattaccctggctttctgccactgcgctgctgcacagtttgtccctgacacgccagcgggggattttttgccactggagcctgttgctggcgatagttactctgatgctgagcctgctgggcaccttaattgtccgttctggcattctggttagcgttcatgcgttcgcgctggataacgtccgcgccgtgccgttgttcagcctgtttgcactgattagccttgcgtctctggctctgtatggctggcgagcgcgggacggtggcccggcggtgcattttagcgggttaagccgggaaatgttaatcctcgctacgctgttgctgttttgcgcagtgctactgatcgtgctggtgggaacgctttatccgatgatttacggcctgctgggctggggacgcctctccgttggcgcgccgtattttaaccgcgcgacgttaccgtttggtctgttgatgctggtggtgattgtgctggcgacgtttgtctctggcaaacgcgtgcagcttccggcgctggtagctcatgcgggcgtgctgttatttgccgctggggtcgtggtctccagcgtcagccgtcaggagatcagcctgaatttacagccgggtcagcaggtgacgctggcaggatacaccttccgttttgagtgcctcgatctacaagccaaaggcaattacaccagcgaaaaagcgatagtggcactgtttgaccatcagcaacgcattggtgaactgacgccggagcggcgtttttatgaagcacgccgtcaacaaatgatggaaccgagtattcgctggaacggcatccatgactggtatgcggtcatgggggagaaaactgggccggatcgttacgcttttcgtttgtatgtacaaagcggtgtgcgctggatctgggggggaggattgttgatgattgcgggcgcattgttaagcggatggcgggggaagaagcgcgatgaataaagggcttctcacgctactgctgttatttacctgttttgcgcacgctcaggtcgtagacacctggcaattcgccaatccgcaacaacagcaacaggcgttaaatattgccagccagttacgttgtccgcagtgccagaatcaaaacttactggaatccaacgcgccggtggctgtcagtatgcgccatcaggtttacagcatggtggcggaggggaagaacgaagtcgaaatcattggctggatgaccgaacgctacggagattttgttcgctataacccaccgttaacgggtcagacgctggtgttatgggcgctgccagtggtgttgttactgctgatggcactgatcctctggcgagtgagggcgaagcgatgaaacagcccaaaataccggtgaaaatgctgacaacactcacgatattgatggtatttctctgtgtcggcagttatctgttaagcccaaaatggcaggcggtacgtgcggagtatcagcgtcagcgcgatccgctacatcagtttgccagccagcaaaccccggaagcgcagcttcaggcattgcaggataaaatccgcgctaatccacaaaacagcgaacagtgggcgttactgggcgagtactatctgtggcaaaacgattacagcaatagcttgctggcgtaccgtcaggcgttgcaactacgtggtgagaacgctgaactgtatgcggcgctggcgacggtgctttattaccaggccagccagcatatgaccgcccagactcgcgcaatgatcgacaaagccctcgcgctggacagtaatgaaatcaccgccctgatgctgctggcttccgatgcgtttatgcaggcgaactacgcgcaagccatcgaactatggcaaaaagtgatggatctcaacagtccgcgagttaaccgaacacagctggttgagagcattaatatggcgaaattgttgcagcggagattggattaatcatctggtgatgaagattatgtcattgagctgcataaaaaataatcgaatgaacatatgccaaaaataatcactaatcagtattattgcagattaaacaaataaaaatctttccataacaaatggttattcattaatcctgccataaactcgcgttattatgcattaatgcagcgaaaagctctgttgttaaagggttgcgcaacataccgcgcaaatgatactgatcataagcgttaaaaaaatctacaaaccaacgcaacacaattcatgccctggcagtatgtcacgttctcgcgtttctgaacggggaacggcgctccattgaggaagtcattcatatgaaaaatataaaattcagcctggcctggcagattctgtttgctatggtgctgggcattctcctgggaagctacctgcactaccatagcgacagccgcgactggctggtcgtcaatttgctctctccggcgggtgatatcttcatccatctgattaaaatgattgttgtgccgattgtgatctccacgctggtggtgggtatcgcgggtgttggtgatgccaaacagctcgggcgtattggcgcgaaaaccattatctacttcgaggtgatcaccaccgtcgccatcattttggggatcactctggcgaacgtcttccagcccggtgccggggtggatatgagccagttggcgaccgtcgatatcagcaaatatcagagcactacggaagcggtacaaagcagttcccacggcattatgggcacgattttgagcctggtgccgacgaacattgtggcgagcatggcgaaaggcgaaatgctgccgatcatctttttcagcgtgctgtttggtctggggctttcttccctgcccgcgacgcatcgtgaaccgctggtgaccgtgttccgctccatctctgaaaccatgtttaaagtgactcacatggtgatgcgttatgcaccggtgggtgtgtttgcgctgattgcggtgacggtggctaactttggtttcagctctctgtggccactggcgaaactggtgctgctggtgcatttcgccattctgttcttcgcgctggtagtgctgggaattgtggcgcgcctgtgcgggttaagcgtctggatcctgattcgtattctgaaagatgagctgattctggcgtactccactgccagctctgaaagcgtgctgccgcgaattattgagaagatggaagcctacggagcaccggtgagcatcaccagtttcgtggtgccgaccggttactcttttaaccttgatggtagcacgctgtatcaaagtattgccgctatcttcatcgcgcagttgtatggcattgacctgtccatctggcaggaaatcattctggtgctgacgctgatggtgaccagcaaagggattgctggcgtgcctggcgtgagctttgtggtgttgctggcaacgctgggtagcgtaggtattccgctggaaggtctggcgtttattgctggtgttgaccgtatcctcgacatggcgcgtactgcgctgaacgtggtgggtaatgcgctggcggtgctggtgattgccaagtgggaacacaaatttgaccgtaagaaagcgctggcttatgagcgtgaagtgctgggcaaatttgataaaactgcggatcaataattgaagattgccggggatatccacccggcaatgtgtgaatgcctgatgcgacgcttgccgcgtcttatcaggcctacgccagacagcgcaatagcctgatttagcgtgattttgtaggtcggataaggcgtttatgccgcatccgacatcaacgcctgatgcgacgcttaacgcgtcttatcaggcctacgccagacagcgcaatagcctgatttagcgtgattttgtaggtcggataaggcgtttacgccgcatccgacatcaacgcctgatgcgacgcttgccgcgtcttatcaggcctacgccagacagcgcaatagcctgatttagcgtgattttgtaggtcggataaggcgtttatgccgcatccgacatcaacgcctgatgcgacgcttaacgcgtcttatcaggcctacgccagacagcgcaatagcctgatttagcgtgattttgtaggtcggataaggcgtttacgccgcatccgacatcaatgcctgatgcgacgcttgccgcgtcttatcaggcctatcttaaccgttggttaatttttcaaactcttcacacccggtatcaaacccttccatacagctcaggttcaaccagtgcagcgccttttgcttgttcttctcgataaaaccttcttcaccgtttaagaacatcattcccgcccagtactcggaataaccggttcgggaaattgcagagctgcgtttgaaataccaggttgccttgtcatcgtcggccttaatgcccacgccgttggcgtaaatcaaaccaagcagcatttgggcatcgacggcagagtcgttctccagatcttcgctggcgttttctaacaggctaattgcctttggataatccggtttacccgcttgagtatttaccagaatatgcgccagcgttacttcaccttctttactgcccgcttgcgccgctttctctgcaagaacttttgcttgtggatagtccagactgaccggattggtgattttgatctgcgccagcagcgcgcaggcatcagcatcaccgctgtcggcggctttctgtgcccaatattcggctttgctcaaatcgccggagctaaaccagctgtcggcaagaaaatattgtgcgcgtcggtccccggcctctgctgcctttaaatactggctgccaggctcggagtcgttggcgtgggcaaagaatgtcaaaaacaacatcaatgcgataatttttttcattttgataatacgattgggtagggagtaaccagtataaagagttcgaatggataaaaaaacagcctccgaaaggaggctgtagaaaggacggtattacgccagtgccgcttcgcgcaggcgagttttcaacttgttgtactcgtcaatcacgtactgctcggcggcgcgctgatcggcgatcggctcgacgcgaacggcgcagtatttgtactccggcgttttcgtaatcgggcttaagttttcggtaaccagctcgttacaggcaccaatccaccactggtaggtcatgtaaatcgcccctttgttcggacgatcgctgacctgcgcacgggtgataattttgcctttacggctgtgcacccaaaccaatgcctcatcttcaatacccagacgtttggcgtcttcggtattgatttgtgcgtagccaggttcatcagccagcgccgccagtgccgcacagttaccggtcatgctacggcaagagtagtgaccaacttcacgcaccgtactcagtaccatcgggtactcgtcggtgagtttgtcgattggcgctacccagtcgcaggtgaagaactgcgccagaccgttcggggtatcaaacttctctttaaacagataagaagtcccctgatcggcatcactagtatcgcggcaaggccactgaatgaagcccagttcgcccattttctcgtaagtcgcaccgtagaaatccgggcacagatgacgcaactcatcccagatctcctgggtgttgttgtagtgcatcggataacccatacgggtggcgatttcactgatgatttgccagtccgttttcagatcccatttcggttcaaccgccttgaagaaacgctggaagccacggtcagccgcagtaaacacgccttcatgctcgccccagctcgtactcggtaaaataacatccgccgcgctcgcggttttggtcataaagatgtcctgaacgataaccagttccagatcttcaaaggctttacgtactgcgctcagctccgcgtcagtttgtagcggatcttcgcccataatgtacgcggcacgcacttcgccatgcgctgcgcggtgcggcagctcgctgatgcgatagccggtatgcgctggcaggctttccacgccccaggctttggcgaatttctcgcggttagccggatctttcacgtactggtatcccggatacgtatccggcagcgcgcccatatcgcaggcaccctgaacgttgttctgaccacgaaccgggttaacacccgcatgcggcttaccgaggttaccggtcagcatcgcgaggctggtcagagaacgcacggtttccacgccctggtagaactgggttacacccatgccccacaggatggcggcgcttttcgcctgggcatacatccgtgccgcctgacgaatctcactggcgctgacgccggtgatatcttcaacgctctccggcgtgtagccttcaacgattttacgatactcttcaaagccttctgtacgactagcgacgaacgctttgtcgtacagattttcttcaataatgacatggcccatcgcattcaacagcgcgatgttgctgccgtttttcagtgcaatgtgcatgtcagcaatgcgcgcggtttcaattttgcgcggatcgcagacgataattttcgccccgttacgtttagcgttaattacgtgattcgccacgattgggtgggaatccgccgggttgtacccgaaaacgaacactaaatcggtattatcaatttcgttaatagcattgctcattgcgccattaccgacgctttggtgcagacctgcaacgcttgggccgtgtcagacacgagcgcagcagtcaacgttattggtaccaataacggcgcgcgcaaatttttgcattacatagttggtttcgttacccgtaccacggctggagccggtcgtctggatggcatccggaccgtacttctctttgatggcgctcaggcgctcggcaacgtaattcagtgcctcatcccaggaaacaggttcgagtttgccgccacgctggcgacggatcatgggggttttcaggcgcggggtcaggatctgggtatcgttaatgaagtcccagccataataacccttcagacacagggtaccctggttggttttcccctgcgctgcctccgcccggacgattttgccgttatcgacgaccaggttgattttgcaaccacttgcgcaataggggcaaaccgtgacgacttttttcatcggtctcgctccagttaatcaaatcacgcatacgcgctctcgactacagtatgcatcttttatgccacattttatgtggggtcattccctgatattacgggcactatttattcaaaactctgacgaaaaacaggctgtcgtcagttttgacgtgacgaaacgaaataccgcgtgacagccatcacgcggcagacattttattttttctcgacgacgggacctgcctgatacccgccgcccaggcttttcatcaactgaatgctttggatcacccggcggctgtccagcatcagtaaactcatctcttcggcaagcactggcaaccgggcttcggtggcctgtaagcggctggttaagccgcgctgataggcggcctcggcagcgcgctgggtaaagcgcgtggcttccacgcgttcagcctgcatttctcgctcgtcgttgagcgtttgcagacgcgtgccgttgacggcaacgtcacgcaccgcgttcagtacactctggttgtaacgttcaatcatcatgttgctggcggcgcgcgtgccttcgagattggcattcaaccgtccaccgtcaaacagcggcaatttcagacccgggatgaagttgaactggcgactggtttttttgaataaggtatgcagatggatggagtccagaccgaaaaacgctttgatatcaaagctcggatagaacaacgcccgcgcggaatccacctgatctaaactcgcctgaacataccagcgcatggcttgcagatccgggcgtctggcgagcaactcataagagagtgtcgccggaatgccggtctggacttgcggtaatgccaccggtctgatctccggcatatcgctggctcccgcgccaatcaatgcacgcagagattctcgcgtttcggtgatttgccctttgacggcaacaatttgtttatcgaccgccagaatctgtgcccgcgcgccgtggaaaggcacttgcgcttccagaccgtgcgccactttactctggtgcgctttcaccgcgtaatcaatcacatcgtgagtttgttctaacagatcgagcatctgatagctggcctgcatactgtaataaagctgcgctacgcccgtggccaggcttagctctactgctgcggtttctgccagcgcggcattatgcgcgccaatggcggcggcaaccgcactgcgatgcacaccccacaaatcaagatccagtccggcaaacaaacctactgtggcttccgtatagtacggcccgtccatacccagtgctggcgcatccatactataagggcttaaaaagccgttcgcgctgacacgttggcggttgagcatccctaacgctgcgacctgtaattgactaccggcatctaacaaatcggcctgggactgcgctttttcttcccgcagtttcgcttcggcgagggtgtgactaccacttagcgtccgttggatcagcgcatccagctgcgggtcattgagttgtttccaccactgcgcctgcggccagccggagctggcaagatgaatatcgtcggccagtttgatttgttccggtttgagctgttgatgaggtgcagaatccttacgtaccagggcacagccggaaatcagcgtcgtgctgccgagaatgctgcacaacagcagacgactaagttgacgattgatcattgcgtggctccttgtgcctgttccgtggcgggcgttaatgccggggctgtccagtctggcaagcgggcgaaaagctggcagacgtgttgctcctgttttaataaggtgggcaggatggcctgagaggcgggtgtctcttcaagcgttatttgaggagaacggctgagtgcggttgccagaccggcagcgtatttctccagggcgtcggcaaactgacctgctctgtccggctgtagtgcgttatccagcgcctgcgcgctgttccaggtggcatcccaggcgtgaagaagatcgcggccctgacgaataaccgtttggctacgttcaatcagtaatgcgcgttcttcgctgtccagttgacgctccagcgccacgcgttggcacatctcttcacaggcattaaacgccgcatgcagaccgatacgaatttgcagataagtgcgcagagccgtgacttcctgctggcgtgggatccgcattactttacttaacatacccagcgtgccagccagtttttgcggcagtgtgcgcgcttcactttcaggccagacaaaggtgtaaatcaccgcggacaccacggtaccaatgatgatacccagggcgcgatcgcgaatttccaccaggtcgtacactgggccaaaaacgttttcgagcgtggcgagcgcgaaggtgaccaccatctgtgtgccgatataagaagagcgttcagagctggtggcaatccatgcgcccaacaggaaaatcggtgccagcacaaacagcaattcgacaatattgtccagccagggcatgaccagtagcgtgaataacagcgccagaatcgcgccgcaaaaggccccgccaaaacgcagcaccatcttctggtagctgctaccgacatttgggttagcgacgatcacgcatgtcagcatacaggtgtgaatgccttcccagtccacgccgctgtaaaaggtgtaacagatcaaacaggcgagcagcgtttttaccgcgtagcgcatatagtctggattggtaaaagcatcggcggccatacttggcggtttggctgcgggcgttggcggcgtattcgggtccatctgacccagttgtaacaacgtctggcagatattctccaggttacattcccgtgccgccatcgcttcactttcactgatccgccagtcgctttgccagcactgaccttcagcaacggcatgctgcagcttgttgatttcactagctaatttttgtcggaattcaataattgcctgagaatcagcaaaagaggtgggatcgtagcgattcagcgtgctgtaaatgtaggttaccgttgccacgcagctttgccaccatgcgttttgagttcgccagttggcatcgtccgcgaggcaaaagacattgagtttttgtagcgccagcgcctctctttcaatccgcgtttcgggtagcggtgcgaggctgtctgtcaggtgactaatggcatcatcaagccgatcattaagcgcctgatgcatttggctaatggcacgactgggaaaccacagcacgccgattaacgtcatcagcaaggttggatagaggccaacaacgatacaccacagcgttaagcgcacgaccacttccggatagtcgagcatggcggggaaggtttgcccgtaaatagcgacaatggcgacggcgaaaaagaccagccccaagcgatgggtgcgcatcaaaaacatgcagcccatcaggatcggtccggcgatgatcaatcggatcaacggttcgccgtaactccatttgtagatcaaaaacaggctgccgatctccagcaccgtggcaaccacaaacaagatcgcgacaaatttggtgtaaaacgcgttgctctgaataccgtaaaacagcactgccaggcttaacgccacaaaagggatctcaaaggtcatgctgatcagaatcaccagcaggcagcctacccagagttgcacggtctgcggcacgcgacctggtcgccgctcgcttaactcttcatgaaagaacgccagcagcctgaccaccggtaatggcagggagttgagcgcgctcattattgcggctcaagattagcgactgcgctagcgccgatgcggaacatttccgggtcaggtttatcgaccatgattttgaccggaaaacgctgggcaacgcggacccagttaatagaacgagacactttcggcaggccgcccagcaccaggccgccgtcatccggtagcacgccgtagccaatgctatccactttaccctcgaaggttttgccgctgtcactcatcaggcgaatcgttgcgggtgtaccactgcgaatatttttcagatcggtttcgcggaagttggcgatcacataccagtgacgagtgtcgattagggtaaaaatagggcgcatggcagaagcaaattgcccgacggaggttttgagggaaatgacccggccatcaaacggcgcgcgaacggtcgccatttccagatgcagtttggtcagggcaatatccgcttcgaccgccgcacgctgggcaactaatgcatccacgccgctgacggcgctggcggcactctgcgcctgtaacaatacggcattaagatccgcttctgcggcgcgctgcgccgttcttgcacggtcaacatcttccgcactgacaaaaccttctttcagtaatggctcggtgcggcgtaatgtatctgtggcctgtttcgcggcggcacgggctttttctaccgtggcattaacgctgtcggcaccaaactgttgcgcgtcaacgctacgctgggtgagcataatttgcttatccagcgccgcgagggaggcttcagctttcgccagattggcttcgtacgggcgcgggtcgatgcggaacagcaaatcgccctgtttgactgcctggttgtcggtgaccgccagttctacaatgcggccgctgacttccggtaccacatcaatggtatctgcactcgcgtaagcgtcattagtacttggcgcactgtctacgcgccagataacgaaaacaagggcaaccagcgccaacgcaaccactaacagagcagggaatttactgcgaggagcttttttcggcgtactttccatgagcgcgtctcaaatagattagaaaaatgccagccagaacagcatggcgtagagagcaaaaagggcggtataaataattccgacaaatgccagattgatatttgcccgctgaataactcgcctcgtgatgagcgtcaaaataaggctggcaatggcgcagaaaaaccagctgggataataagcgccgatcaccgggattgccggagataatgagcatcccgaaaccatgaagacgggaattatccaggctgtttttttgagttgcatcgccatgcgagagagaactgttggcatattaaatacatcctgtctgctgcgaacaatatctgtagtgaatatcaatatccattgaaggcgtcagtatggctattttcttgatgaataaaaatagctttattcagccaccgcattcataacttatatattttatttattaattggctgtatatatttttaaaataaatacttttgggggcttcagcgcccccaaaagcgagtgacattaatttggggttacgatattcacccacaaatcgaaattatccagacaggcgataatttcttccagtttcgcgccattgccaataattttggctttcttcgcttttaccagatccgccattttggcttgtccggtcagcacggcgtgcagatcttcacggctgatgtagaaagaggcgtcggcttgcggttgcagcgttttccggtagttaagcacgctatcgttcagcgtcaggttgaggttatcgccgttgctcatattgaagttcaggctgatatttttacccgcagctttcgcgctatcgaggcgaacggccataaagtcgaacagcatttcgacgctcatcccgcgaatggtgtccggggaaccggtggtgccgtggctgaacttatgcaccccttcgcgcagctctttcgcgccggtcaggtagaaaccgcgccatgtggcggactcggcctgatagcccagctgttcaaagttattcgcttgcagattcttcgcgacctggtcacccgggttggcggcaatcacctgtttcagcagttctgcgctccagcggtaatcaccttgcttgttcgcttcttgcgccaggttgatgacacgggcagaaccgcccagcgcctgcacgtaacgtttacccatctccacctgaccatacggatgcaggttagccgggttaccgtcgtaatagccaagatagaagttatacaccgcgcgggcgttgtggctgacagaaccgtaatagccgcggctggcccagttattggcaagtgcaggcggcagcttaatcatgtcgccgatttcattcatggtgtagccctggttcgccaggtgcagggtctggtcgtgaatgtacttgatggtatcgcggtatttaccaatataatcattgatatgcttattgccccagaccggccaggtgtgcggcataaacagcacttccgcgtcgttaccccacatatccagcgtttcgttcagatactcggtccacttgctggtgtcgcgggttttcgcgccgcgcagagtgtagaagttgtgcagggtatgcgtggcgttctcggcggtacacagggctttcagggccggaatatagaagtgcatttcggctggcgcttcgctacctggggtcatcaggaagtcaaactccaggccgtcgataatcatcttctcgccagttctgacgatagttttcgtcggtgcaataatgctcgggtcgcccgttgccagcgtcacgccaaggccattacccacattgccttgcgcgttgtgcggcagtaacagaccgtaagagtagagcgcacggcggctcatgatgttacccgccagcacgttttcgctgatggcttcgtccataaagcctgcaggggcaatcacctgaactttgccggatttaacatcggcttcagagataatgcctttcacgccaccatagtggtcggtgtggctgtgagtgtagataacggcaacaatcggtttttgcggacgatgctggaagtaaaggtcaagtgcggcttttgcggcaggcggcgtcaccagcgggtcgataacaataatgcctttctcgccctcaacgaacgtaatgttagagatatcctggccgcgcacctgatacattttatcggtgactttgaacaggccagaaataccgttgatttggctctgacgccacaggctggggtttacggtttccggcgctgcggcattaatatcaaatttgtaatcgtccgcgcggtagtaaactttaccgttcgcatcacgcagaataccttcatccagcagcggggcgataaatccacgctgggcatcgtcaaaatcctgacgatcgctaaacggtaaacttttggcgtaattctgattaacctgttgggtatattgagtggcggctttcgcttcctctttcgcgttagcggtatttaccatcatgccgctggcggcagttaacgcaataacaatcctgctcaaacggaataaccgagagttattcatataaatctccatttatcatttatgtcgtaaatatgtaatccatgcaaaatacgtcatttaaagctggcgttatcataattgggaaattgcgactttaataagtggaagtgtgagcggaacgcgccattttattaggcatttgtgctgaagagggaaaattacagtaaaactatcattgcagaaaataatatgagtcgttttatgtgtttattatatatattgtacctgtcgttggcacagcgggacattgcgctactgtgccaacgttttactcatggggctttagcacagaactgtggcaaaaaacgttgatgcgccaatattgctgcaccctgagcgccattaaagtcagaagaactggcggcaataaagcgcacgacctgatgcggcagtggacggcgcaggtacttttgggtcatggcaacgagagtctcgcgtgggaaggcgggcatatccatcacgccaccgcccaggatcaccgcatcgggatcgaacagattaatgctggtggcaatggcccgtgccgcgttttcaagcagactctggacgaaaggggcgttttccgcatggacgaaaagatcgcgcaatgggtaatttcggggctgttgttcgtaccagcgtcttagcgccattccagagcaattggtttccaggcacccaggattgccacacgcgcagtgttgggtcatatctcccagggggatatgacccagttcgcctgccacaccgtgtgcacccgtccacggcgcaccgttcatccacactgcgaaccccatccccgtaccgagataggccgccagaaccagttgttgcgtaaggcggttttctactacgtcccaggagagttgcaggttaacgtcgcgggaaaactcaaccggacaattcagcgtattttcgagcttatcggcgagatcatataaatccgccgctgttaacggcaggttaggcgtagaaataatggtgcgtttatctttactgaccagcgccggaaatcccatcaccagaccatgacagcgagcgttaaagcgcctgagttgctcgtcaatcatttcgccgataccgctcaccaggccgggagcaatgacttctgcggtccgctttttttcgcagtgtagcgtttcaccttctgctgtccgcagacaaaagcggatatgcgttgcccccatatccacgcccgctacgacgttatgctgtttttgcatgaggctgtacctcgctttttgcagccagaatctgcgcggtcataattctccatgcttcgtcgatattttccgcatgattaaacaggccggaagtgccgacgataaagacatccgcccctgccgccatcagtttttcgtaagttgcctggttgcaggaaccgtccacctcaatttcgtactccagaccttctcgttcacgccatgccttcagttcggcaagtttatccagcatttcaggaatgaacggttgtccggcaaagccgggatcgacagtcatgaccgtaattttatcggccttatggatatagtatttcatggcctcaactggcgtctccgggttaaggatcagccccactttcatgtcatgacggcggatttcatcaatcaggcggaacgcctggccgttgatggtttccggatgcagagtgatgaaatctgctcccgcacgcgccagttgagcaatgtaatcctgcggccgcgtcaccatcagatgacagtcgagcggtttagttgccagttttttaacctgacttacgaagaacggactgagtgtcagattggggacaaagtgaccgtccatgatatcgatgtggaagtaatcggcatggctgtcgataaattcgatctgttctttaaatttcagcagatccatacacattaagctgggggagattttcatgttcaattccttacttactgataagacggtcaagggcgacagccgcgataattaatccgcccatcaccaccagttggtaataggtttgtacctgcaaaatattcagaccgttgttgatggtgccgatgatcaacccgccaatcaccacagagaaaatgcgccccttgccgccgaagaaactggtgccgccaatgatggcgctggcaatggcataggtttcaaaacccataccggcaagcggttctgcggcaccgagtcgtgcagtactgacgacgcctgccagacctgcacaaacaccggagatgataaacaccaccaggatgtggaatttcacgtcaatcccggaatagaacgcgctatttttgttgccgcccagtgcgtagatgttgcgcccgagccgcatacgcgttgtcagaaaccaaaggatgagcgcgacaattagactgaagataacggggacaggtatcccaattacgctggcggcaaagaagttcacgaagtcaaaactgaagccgtatacgctgttggcatcggagatcaccagcgtgatcccacggaaaatcgcgttggtgccaagggtgatgatgaacgggtgtagccccgtccagttgaccaggcagccgttgatcgcccccagtgcgccgccaaccagtacaccgccaatcatcgctgcgagaaacgggtcaacacctgccaacatcagtttggcggtcaccataccggaaagcgccagaatcgcgccaacgctgaggtcgataccagcgaccaggatagcgaaaaactcgcccatgccgatcaataccgtcacggagctttgaacaaaaatctgggtaatattattggtggtcagaaaatattctggactcaggctaccaaagatggcgacgatgatcgccaggataaaaaaggtgccgtatttatcccagaacagcgcaaagttgaacggtttcttctcgctcgcttcgctttttactcttgtggtaaagcccatgccataatctcctcttcgctcatgtcatcgcgattcgtcaggatttgcgtcagtcgtccttcgcagaacacggcgatgcggtcgcagacggtgataatttcaggtagttcagaactcaccatcaggatgacttttccgtcgtccgccagttggcgcatcactttgtaaatttcggctttcgcgccaacgtcgatgccgcgggtaggttcatcgaaaataatcacttccgggcaacagcacagccatttggagatcaggactttctgctgatttcccccggagagttcggtgatattctggtttacgctatgacatttcagcgccagcagttcgcgttgattttcagcggtacgttgctcgtcaacttcatgaaacaagcccatcgcgcctttatagccgccgtctttcagactgcggctgatcgccatgttctgagcgatggaaaagttggggaaaaaaccgttatcccggcggctttcagtgatgtaagccatcccttttttcacggcatccaggggactacgtggagagatatctttgccattaagacggatttctccgccagcgcgtttatccacgccaaacagacaattcatcagttcagtacgtccggaaccgaccagtccggcaaagcctaatatttctccccggcagacgctaaaactgatatcccggaccttttttctgtcacgactggtgacgttccgcacctcaaaaaccgtttcgtgcgcaaggttgctgacattctccttcatcgcgttaaaacggttttgcagttcgcggcctaccatcagacggacgatatcgtcattactcacatcgcttactatgccgctgcaaacgctgctgccgtctttcatcaccgtatagcggtcgcaaatacggcgaatttccgccaacttatggctgatatagacgatggccgtaccctctttacgcaactgattcatgatcagaaacagatagtccacctctttattggtgagactggaggtgggttcatccatgatgatgactttggcatcgagcatcagcgttttggcaatttctagcatctgcttgtggctgatagataaattcgccactttctcatctagatcaactttcaagcccacgcgtaataacatcatggcggcgcggacacgcatttctcgccagtcgataatattgacgccacagatttttttcgtcagatgacgaccaatatataaattttccagtacggttaattcatcaataacgctgagttcctgataaataatcccgataccgagttgtgccgctaatttatgatccagcttgttatagctaatgttattaatggtaatggtgcctttggtcggctcatgtattccggataaaactttcattagcgtggatttacccgcgccattttctcctagtaatgcatgtatttcaccaggataaaccgttaaattaacgctctttaatgcgtgaaccggaccaaaggacttgccgatccccgccatgcttatatatggcgtggccataaataacctctctgcacgaaatatcgtattattgcctgatggctacatttatcaggtctacgttcaggttattttgttggccggataagacacttcattagcatcatcatccggcatcattcagttttattgagtgaccaggatactatcgaccagtttaaattccggtgctttatccagcgggataaccttgccggatttctcagcgtcaaccatcagcttcagacccgttgcgccgatatccgccgggttctgggcaaccgtcgcggtcatttgtccggcttccaccattttgcgggcttccggaatgccatctgtaccgacgaccagcacttttcccgtttttccggcgtttgcgactgcctgagcaacacccattgccatcgtgtcattcgcgcaatagatcgctttaatattcggattacgttgcaacacgttagtggcgacatccagtgctttaatgcggtcccagtcggcaggctggctggcgacaagcttgatctggcttgcttttttgaaggcttcggtggcaccattacgacgcgcttcaccggaggcgttaccggctttaccctcaatgattgcgacttcaccaccttcagcgcccaatttgtcaataatgaagctcgcgcctttcgccccgacagcaacgttatcggtggtgacaaaagcttccacattgccgccagcttttttcagattatccatgtcgattttttcatcgagattaaccagataaatgccttttttccatgcgcgggcgacaggcatgaccagattcacactggataatggagcgaaggcgatacctttgtaatttttattactgagatcttcaaataactgcaattgagattgaaaatcgccttcactaggagaggcaaaaatatcaacgctgacgcccagtgtttttgcttcatcttcaatgccttttttcatatctacccaaaatgggttggagagggttttcaatacgacagcatattcggcggcagcaaaagcgctggtactcaacattaagcccacgagtgtgccgctgaaatatttcagatatttattcataataatgttctcacggtaaggggacaggtaactccgcgatggcggaattacctttttcttatttcagcgcgcctggactgaagaaatcaacaattgcgccggttttttgcatattaatattagcttgttcaatgttgagctgggcgacagagacaaaaaaagcgtccagcaaagttagttgtaatattcttgcgctggcattacgacctaataacggcgtttccggggctggactgcaaataatataatcggccagtttcgctatcggactatggtagctatgggttatacaaataatctttgccccgttcttttttgccagttctacggccgcttttacatcactggttcgcccggaatgggtcactaccagcacaacatctccttcctgtaacaagctagcggacatcatcatgatgtgagcatcaggataggcctgacagcgtacgccaatgcgcaagaacttgtgctgtacatcagcacagatagcattacttcctccggcaccgtacaaatcccgctgtctggcctgatagaaaaagcgggcggcacggtggatctcatcaacgttgacgatgctctgaccttccataatggtgcgtaaagtgatgttaaataccttattcaccacatcctgcggcgcttcatcaaaagccaactcggaaggcaatacctgttcactctgagaaaaataatcttccagcgcactgcgtaagttacgaaagccgctaaaccccagcagcttacttaccttaactatcatcgcttcagataccgccagagcttctgcgacatctttaattgcgggtgcacaactcaggttaccgggtttgagtaaccactccacgatgcggctttcattttctgtcattccttcctgcttcattcgcaggtaaggcgctaaccctataccgttcggaagcgcactatcaaactcactctggctcatcacgttctcttgtccttgaattgaagacgccactatatcaccacagcaagaacagaaaagatgctggcgacttcacaaaaaaataaaatttataaagtttattttattgtgaacaatggcgagtggcttaaaattttatttcatttaattagtttaaaaacatgatgttatttgtttttctggttttttagatgatagatgttgctggatggtgagtgtctttaacgctattgcgctgtcagatgtaactctgtaaaacagatcaggaaggcgtaattcatcgattttgggtgtttttaattcattaacatcacaaatgttttttgattgtgaagttttgcacggacggggaagatgaatgaaaaagattgcatttggctgtgatcatgtcggtttcattttaaaacatgaaatagtggcacatttagttgagcgtggcgttgaagtgattgataaaggaacctggagcagtgagcgtactgattatccacattacgccagtcaagtcgcactggctgttgctggcggagaggttgatggcgggattttgatttgtggtactggcgtcggtattagcatagcggcgaacaagtttgccggaattcgcgcggtcgtctgtagcgaaccttattccgcgcaacttagccggcagcataacgacaccaacgtgctggcttttggtagtcgagtggttggcctcgaactggcaaaaatgattgtggatgcgtggctgggcgcacagtacgaaggcggtcgtcatcaacaacgcgtggaggcgattacggcaatagagcagcggagaaattgagattcatccactacttgcatggatgagtaatgattaatgtggatagagtttctttttgaggttggctaatgaaacgctttccgctatttcttttattcaccctgctcacgctgtccaccgttccggcccaggccgatattatcgacgacaccattggcaatattcagcaggcgattaatgacgcttataaccctgaccgtgggcgagactatgaagatagccgcgacgacggctggcagcgtgaagtgagcgacgatcggcgcagacaatatgacgaccgccgccgccagtttgaagatcgccgcaggcagctggacgatcgccagcgccagcttgatcaggagcgtcggcaactggaggatgaagagcggagaatggaagatgagtatgggcgatgaggttgggtatggagcaggcatcgcccctcaccccaatggggagagggagaaaacgagcgcaatattcaatatcgagcacaatcggtcccctcgcccctctggggagagggttagggtgagggggccagcgcgcacattccctctcatcacgccaccccaatctccatcccatcaaaccccacctcaaacccactcggtagtgcgttttccatcagccacgcatcaaactggtggctgatatgggtcagaatcacccgtgggctgcggataacctgattcagcgcaagcacggtatttaaatcacagtgattacgcggtgcatccgcgcgcggcgggtgactgcaatccatcaccattacctgcggctgattattgcgtaaaaatttcagcgttttttccggcaagcctgcggtgtcagacagccacgccacccggctgtgtgccgtttccagcagataaccgaaggtcagtttactgtggttgagcggcaggggcgtgacctgtaacccctgcaaatcaaacaccacaaacggttccaccgtgtggctgaaatcaagcaggcccggatgtttaaacagatcgtcgcagccctgttcatccggcgggccgtaaaccgggatcggatcgccaacgccccagcgcagcggaaacagcccctggacgtgatccatatgataatgcgtcagcaaaaactgctggaagcttccggggctccagcgatcggcgagatcgtgcagcccggcgtcgatcagggtgattgcgtcgttaaacttcactacgccgctgcacggttggcggcgatactgcgggctgcgccgcgctctggcgcaggccgcacactcgcagccccatgccggaacgccctgtgcgccgccggtgccggtgagcgtgagggtcaggctcatgttacagcgccttggtgaagcggaagtggctctgctcgtagccttcgcgcagatagaaacggtgcgcgtcgtggcgcttcacgttggtgctaagttcggtcatttcggccccggcctggcgggcttcttcttctgcccacgccagtaacttactgccgacgttcagaccgcgcgcctgcggcattaccaccaactcctgaatttcgccgatccagttgacatgatgcagatgaaactgcaaatgcaggccgatcatgccgacaacttcgccatcaagcagcgccagatggtagcgcatgtttgggtcgcgcagattggcgttaaaacccacgcgaaacgcgtggtggtcaaactccgcctgttttagctcacaaatcagcgcgtaaaccgcgtcggtgtcgtactgcgtggccgggcgaagctcacaagcaggcatggtgtttctccttctgatggatcagcgtcagcagcgtgtcgacgctctggcgcaggctgccgtcattgttgagcgtatggcaatcctgtggagtatagcgggcggcgcgcgccaggcgggcgttaatttcactggcgttttcacggccacggttttccaggcgctggcggaggatctccgggctaacctgtaaacagacgggcagcagcgcgctttgatagcgcgcccgcgcctgcggcagatgggcgcgactgccgttgaccagcacgtcgaatccggcgtgcagccagagatcaatctcgacgccgacgccataatacagaccgttagcgtgccagcttaaggccaacagattttgccccgcgcgggtaaaaaactcctgctcgctcagggcgatatggttttcacttccggcgctggcatcgcgcgtgatgtagcgatgcgccaccagtaactgagtttgttcccgcaggcggagttccgccagcaggctgtctttcccggagccggacggccccattaaccaaatcagttttcccatcatcagaacacccttttaccctgacgccagacgtggtcgatatgaatatgattgtccttgcgatgcgccagcaccaggtcggcgcgtttgccctcgccaatcaccccgcgatcctggagattaagcgcctgcgctggatttttagtcaccagcttcaccgcctgcggcagcgtaaagcggttgctctggtcatcggcgacgcgaaatgccgcatcgagcaggctggcggggtagtagtcggaagagaggatatccagcaggccaagctgcgccagttcactggccgccacgttgccggagtggctgccgccgcgcacaatattcggcgcgcccatcagcacgttcatgccatgcttgcggctggcttccgccgcttcgaacgtggtgggaaattcggcgatcacgctgccaagctggtgagattcagcaacgtgggcgtgggtggcgtcatcgtggctggcaagcgcaatttttcgcgcgcggcacagggcggcgatggattcgcgattcggctggctccagcgtgcggcgagcgccagttgctcttcttcgtactgctgcatctgcgcatcagtgagggagtatttgccctgataatattcgcgatacttctcgcggttggcgaactggcgctggcccgggctgtggtccatcaggctcaccagcgtcaccggctcgcgctgcaccagtttttcaaacagcggcagcgtggtgtgatgcggcagttcgcagcgcagatgcagacggtgctcggcgcggttgacgccgcgtttctgcgtctcttcgatggcgttgatcatcttctccagattctccagccgatcgccgccgtcgcgcacgtcgccaattgccacggcatccagtacggtggtgatgccgctcgccaccatcagcgcgtcgtggctgctcatcgcgctgtgggcaggccagtcaactttcgggcgcggggtgaagaatttatccagattatcggtatgcagctcaatcagccccggcagcagccagccgccttcgccgtccatcgcctccggcaggcggctctggctttcggcaaaggcgcggatttcgccgttctgcacctccaggctaccgcttaccacctcgttttccagcaccagcttaacgttattgataatcatgaagaggctcccattgggtgttagctcaactagaggctcccattgggtgcaggcggtcggcgacgtcattacgtacagcttcgtcatggaagatgcctacgatggctgcgccacgggttttggcttcgcgaatcagttccaccaccgcggcgctgtttttggcgtccaggctggcggtaggttcgtcaagcagcagaatggggtagtcgacgataaagccgcgggcgatgttgacgcgctgctgttcgccaccggaaaatgtgcttggtgccaggtgccacaggcgttccggcacgttcaggcgggtgagaagacgcgcggctttagcggcgcaggcttcacgcggaacgccggtatcgagcagcggctgcatcaccacttccagtgcactgatacgcgggatgacgcgcagaaactggctcacccagccgacggtggttttgcggatttccaccactttgcgcgctggcgcggtgaccaggtctacccactcgtcaccgtgtttgatctggatttgaccttcgtcgggcagatagttggcgtacaggctgcgtagcagagtacttttgccgctgccggaatggccgtggagcaccacgcattcgcccgcgttgacggtgaggctggcgcgattgaggacgggcaggcgcacgccgttttgctggtgcaggatgaaggttttactgacgttttgtacgttaatcatttttcgcctcgtggttcgggtgtcggatgcgacgctgacgcgtcttatccgacctacggggagcgcatttgtaggccggataaggcgtttacgccgcatccggcaccggctcaattctgcaaaacgctactcaccagcagctgtgtatacggatgatgcgggtcgtcgagcacgcggtcggttaacccactctccaccacttgcccctgcttcatcaccagcaaacggtccgccagcaggcgggcgacgcctaaatcatgggtgacaatcaccaccgcgaggttcagctccaccaccaggccgcgcagcaggtcgagcaggcgggcctgcacgctcacatccagcccgccggtcggttcatccataaacaccagcttcggatgcgtcaccaggttgcgggcaatctgcaaacgctgctgcataccgccggaaaaggtggtcggcaggtcgtcgatccggttggcgggaatctccacctcttccagccacttctgcgcggtggcacgaatatcgccgtaatgacgtgccccggtcgccatcagccgctcgccgatattgccgcctgcgctcacctggcggcgcaggccgtcgagtggatgctgatgcaccacgccccattcggtacgcagcaggcgacggcggtcggcctcgctcattgcatacaggctacggttctcgtagtgaatttccccctgctgcggcgtcaggcgcgcggagatgctcttcagcagcgtggtcttcccggagccggattccccgacaatgcccagcacttcccccggccataaatcaaaagagacatcgctaaagcctttgcccggcgcgtaaaggtgggtcaggttattgacgctaagtaacggttgattcattggttttttgcctcgctctgttggcggcaataatcggtatcggagcagacaaacatgcggtttccggcgtcatccagcaccacttcatcaagatagctgtgggtgcttccgcagatggcgcatggctcatcccactgctgaacggtgaacgggtgatcgtcgaaatcgagactttccacgcgggtaaacggcggcaccgcatagatgcgcttctcgcgccccgcgccgaacagttgcagggcgggcatcatgtccatttttgggttatcgaatttcgggatcgggctcgggtccatcacgtagcgcccatttaccttcaccggataggcgtaggtggtggcgatatgaccgaagcgggcgatatcttcatacagtttcacctgcatcacgccgtactcttccagcgcgtgcatggtgcgggtttccgtttcgcgcggctcgataaagcgcagcggctcggggattggcacctggaagataattatctgatcttcggtcagcggcgtttcggggatgcggtgacgcgtctggataaccgtcgcatcgtccgtacgttccgtggtgtttaccccggtcacgcgcttgaagaagttgcgaatgctcacggcgttggtggtgtcatccgcgccctggtcaatcaccttcagcacgtcgctttcgccaatcacgctggcggtaagctgaatgccgccggttccccagccgtacggcatcggcatctcgcgcccgccaaacggcacctgataaccggggatcgccaccgcttttaagatggcgcggcggatcatgcgtttggtctgctcgtcgaggtaggcaaagttgtagccgctcagattagccatggttctgctcctgttgcagacgtttgagtagctccagttcggcctggaaatcgacgtagtgggggagtttgaggtgactgacaaagcctgcggcttcgacgttgtcggcatgtgccagcacgaactcttcatcctgcgccgggcctgtcgcgtgctcgccgtactccggggcttgcagagcgcggtcgaccagcgccatcgccatcgctttgcgctcgctcatgccgaacaccagcccgtagccgcgcgtgaagtgcggcggctcacccggcgggtcgataaaaccgttaaccatttcacactcagtcatcagcagttcgccgacgttcaccgcaaatcccagctcttccggcacaatgctcacgtcgatatagccgctgcggatctcgcctgcgaacgggtgattgcgcccgtaaccgcgttgggtggagtaggccagcgccagcaaatagccttcgtcgccgcgcatcaactgctgcaaacgggaggagcgactgcaggggtaaaccggcggcgtgcgggtgatgtcatccggctgtgcgccgctatcctcttcaaacttcgccagcccctgacgcgccagcaggctgaaaacgtgcgggctcggctgctgttcgctgtcggcggtggtcagcgtcggcgcttcgccgtttgccagcagggtaaaatcgagcaggcgatgggtgtagtcgtaggttgggccaagcagctggccgccgggaatgtctttataaacggcggagatacggcgttcgagacgcatcccggtggtgtcgagcggctcgcttaccgccagcttcgccaacgtggtgcggtaggcgcgcagcaggaaaatcgcttcaacgttatcgccgctggcctgtttcagcgccagcgccgccagttcgcggtcggcaatgccgccttcggtcatcacgcgatctaccgcgaggttaagctgctgttcaatctgggcgacgctcagttcgggcaaatcggtatcgcctcggcgtcggctctcttgcagggcgtgggcggcgtcgatcgccttctcgccccctttcacggcaacgtacatcagcacacctccacatgagtggttcgcggaatagccagcaggcgctcgccacaggtcaggatcaggtcgatgccgagcgggaacggatgcgggcgctcggtgagttcgtgcagaatgcactccggcagctgcggagcgatcattcgttcttcggcaatacccgcaccagtaaggcgcaacatgcgtccgccgctcaggctggcgacctgtaaaatcagcgtcgcacccgcttccggcgcaacggcggtgccggtggaaagggcgttgagctgttcgctggaaatcgcctcatccgtcaccgcgaaggtcgcctgttccggctggctgaccagcggcgcgttggtatgaaaacgcaggctctggttgacgatatcgttatttaatggggtagaaagccacaccggcgtgtcgttatcggccagcgtcagcagcacgctggtggtggcgatattcagcggttgccagccgcgtttgagctgatgcagggcgacaatcacgcccggctcgctcatggcctttaacaggcgacgaaaactgtgctgggcatcctgcacgggaagcataaaagcggtttccagggtcatgcgttgtctccgcgaaccatcgtaaagaagtcgacccggctggcgttcacttcggcctggcgtgcggcaatgcgtgccatacggtcagcgtccagcggggcaataagggtttcacttaagttttgaaagtggcgagattgctgcatcagcgcgtcaatcagcgcgcagcgttcggcgtgctgtttatcacgcccctgcacccagctgtagccgagcgtgccgtcagtcaggcgcacggcggcgcgggtcagcgtggcgtcgccggcaaaaaaacgttcgccggtgccgcccatccgcgcctgaatctgtaccaggccagtttcagcggcgcggatcacctcatagtcggcggtgatgtttagcgcgttcaggcgtgctgccagttcagccggttggctgtgcgccagcacggacatccagtgctggcgggtcgcggtatctgcgtgcattcagtgctccatagtgaattcaatcatgtcggcgcgcgtcaggctgacggagtactccgccgggctgctttcaccgtcacggtggttaagggtgcgcacgcacagcagcgggctcatattcgggatttcaagacgctggcactctttggcctgggcgcggcgggcgctgatccgcgtctggctgcggcgcagcgcaattccggtttgctcgcgcagaaaatcgtgcaggctgccgctgtcgaagcgttgcagcgtcggccagagggtgaggtccgcgaagtagtggtcgattaaacagagcgcgacgccgttgacacgacgcagggtgcgcaggtggatgacgttctccccctcggtaatccccagtgcgtcagcgacgtggccggacgcggggcgcaatacgctaagcagtttttcgctggtgggatggctgccctgatccagcagattctggctaaaacgcgcctgggcgttgagcgggtaatcgaacgggcgcatcagcaccagcacgccgacgccctgacggcgctgtacccagcctttttccaccagttggtcgatggcgcggcgcagggtgtggcgattcacctcaaagcgcgctgccagttgctgctcggcgggaagatagtcgccgcagcggtagtgttgacgaagctcctgctcaagttttgcggctatctcttgatagcgtgttgggtagctggtcggatgtgtagacaagtgcatagatatcaatgcctcgcttatcagataaagtgcttacgcaaccgttgagagaggaaatccagcaggctgaccgtgacgatgataagcaccatcagggcgcaggtttgttggaactggaaaccgcgaatcgcttcccacagggtgacgccgatcccgcctgcgccgaccatgccgacgacggtcgccgagcggacgttggattcgaagcgatagagggagtaggagatcagcagtggcatcacctgtggcagcacgccgtagaggatctcttcgagcttgttggcaccggtggcgcgaatgccttccaccgggccgggctcaatcgcttccaccgcttcggaaagcagcttggagagcacgccggtggtgtggataaacagcgccagcacgccagcacgccagcgaacgggccgaggccgacggcgaccacgaacagcatggcgaagaccatttcgttaatggcgcggcaggcgtccatcaggcggcgaacgggctggtaaacccaccacggcaccaggttttcggcgctcatcaggccaaaggggatggagagaaccaccgccagcgcggtgccccagacggcgatttgcagcgtgacggccatttcggtgaggtaatcctgccactggctgaaatcgggcgggaagaagtcggcggcgaacgtcgccatgttgccgccgtctttgatcagcgtaagcggggccatttccgcgccctgccacgagacgaccaacacggcgagtacaacggcccagctcagaagcgagaaccagctgcgcttgggtggggcgatggtgatggtttgcatgtttggctccggtctgtaggccggataaggtgcttgcaccgcatccggcatcaacgcctgcacattgtcggatgcgacgccggggcgtcttatccgacctacgatttactgcaccgctttactcacgctactcatcgcgcttagcgcgttgttcaggcggtccaggtcatccagctgcgcctgaatctcggtggtttttgccagcttgtcctgctcattcagtcctttattgcttttcacgccctgcatctctttaaacagcgcgagctggcgaatcggcaccagttgcaggtcgctggaagcgcggaatggcgcccagcccaggcgttccagcaccgctttttcttccggcgttttgccgtagttcataaagaagtcgtagatcttgtctttggtggtttcggaaagattcttgcgccagacgatcggatcgcctgggatcagcgggctcttccagatcaccttcagttctttcagcttctctggcgcggaggttttcagcttgtcgaggttttcggtgttgttggtggcaacatccacctgcttgttggcgacggccagcgcgttggtttcatgcccggcgttgacggtgcgcttgaagtcgctggcggagatattgtttttggcgaagacgtagtagccggggacgaggaagccagaggtggagttaggatcgccattgccaaaggtgagatctttccgcttcgccagcagatcgttcaggttgttgatcggactgtctttgttgacgatcaacacgctccagtaacccgggcttccatccgccgcgaccgtctgggcgaagacctggccattggcgcgatccaccgcttccatcgcgctcagattgccgtaccaggcgatatccactttattgaagcgcatcccctggataatgcccgcgtagtccggggcaaagaaggcgttgaccttcacgcccagcttcttctccatatcctgcaagaacggcgtccattgcggtttcaggttttgctgactttccgtactaataatgccgaaattcaacgccttttcctgctcttcggcgtgcgccgggcttaacagggtgctgaggctgaacatgctggtgaaggccaggctggcaattatcttagcgttcattcgttttcctcaatgatggggatgtcaggcagctttcgcgttctcttcgacgcggttaatgctgcggtagagatggtcaaaacgttcgttatcaaactgttggctgctgccgtcgtagaagacgtgcccctggcgcagggcgacgatgcgttcgcagtagcgcagggcgtaatccacctgatgcagcgtgacgaccacggtgatgccgtcgttctggttgatgtcgcgcagggtgtccatcacgatgcgcgcactttctgggtccaggctggcgatgggttcatcggccagaatcactttcgcctgctgcatcagcgcacgggcaatcgccacacgttgctgctggccgccggagagggtggaaacgcgctgatgggcaaaatgcaccatgccaacgcgggtcagcgcctgtaacgcgcgctgtttctgctcgccggtgaaccagctaaaacaggtgcgccagaacggcgtgctgccgagcgcgccaatcagcacgttctccagtacgctcaggcggttcaccaggttgaattgttggaatatgtagccggtatgggcgcggcttttgcggatatcgcgggccaggcggccttcgcgctggactgtgcggcccagcagctcgatatggctaccgacagatttatcgccggtaatcaaaccgcttaagtgacgtaaaagggtggattttccggaaccgctcggcccaagcagagccaccatttcaccgtgatgaatgttcagatcaaccgcatgcagcgcctgatgctgattgaaggttttggcgagcttctcgacacggataatcgtttgcatgatgcagcctccctaaaaaagtggctccatcgtggcggattattgtgacgatttggttaattaaaagtgactaacagatgaagagttaacgggaattcgatgacagtgcgggagggcgggcctcccggcgggttattgcgttggttgttgtttgacgacattaatcatccacggtacgccaaatttatcggtgactttgccaaagccatgcgcccagaaagtttcctgccaggccatttcgatttttccgttagcggcaagattgtcaaaccagcgttttccttcttcgacctgttggctatcgagcaccagcgtaaagccggagtagctggcttttccactcggcatggcatcgctcatcatgatgtcgcttccggcaatgcgcacattggcgtgggcgatggcggtatcgggaaattgcattccggaagggcagttctcggcgctgtcctgcgcactttttggcatttcgccgaagctgattttatagagcagttccgcgcccaacgtacgttgataataggcaatcgcgtcggaacagttaccggcaaaagagaggtagggacttaacggcatgatggtgacctcagttaagagaagccagttaagtgtagttcgaaatttatacagatgagaggcggcctgataagacgcgcgagcgtcgcatcaggcagtcggcactgttgccggatgcggcgtaaacgccttatccggcctacggagggtgcgggaatttgtaggcctgataagacgcgcaagcgtcgcatcaggcagtcggcaccattgccggatgcggcgtaaacgccttatccggcctacggagggtgcgggaatttgtaggcctgataagacgcgcaagcgtcgcatcaggcagtcggcaccgttgccggatgcggcgtaaacgccttatccggcctacggatggtgcgggaatttgtaggcctgataagacgcgcaagcgtcgcatcaggcagttggcactgttgccggatgcggcgtaaacgccttatccggcctacggagggtgcgggaatttgtaggcctgataagacgcgcaagcgtcgcatcaggcagtcggcaccgttgccggatgcggcgtaaacgccttatccggcctacggagggtgcgggaatttgtaggcctgataagacgcgcaagcgtcgcatcaggcatctggcaccgttgccggatgcggcgcgagcgccttatccggcttaccgatcacaatacaatcagttctttttcacaaactcagatttcagtttcatcggaccaaaaccgtcgattttgcaatcgatgttatggtcgccttcaaccaggcggatgtttttcactttggtgccaattttcagcatgctagagctacctttcaccttcagatctttaatgatggtaacgctgtcgccgtcagccagcagattgccgttagcatctttaacgatcagctcgtcgctttcctgtgcaggttctgcgtcgttccattcgtaggcacattccgggcagatgtacatgccgttatcttcgtaggtgtattcggagttgcattttgggcagtgtggtaaactcatgtggatttcctcaaaagtcagcagggcaaaagcgccaaaaaacggcagattgccgaaaaaggccgcaattatacacaaaatccctgagtttgtcgggggtactgctgattttagacgacgatcgttttcatttgaaaggaaacgcaaaaagaaaataatctttttgcctctatttattatttaagataatgttaatgctctacttgttctttttttaattcacatgatatttttatctttctgacgttttaaacgtatcagaagacgttatttattctgataaaaaacaacacactaaatataaaattatttcttgcagtaattataaaagccgaaaacagaactcaaaaacaatctggctaaataaaataacaaaatttgctttaaggaagaattttctatgtacacacagaccctgtatgagttaagtcaggaggctgaacgcctgttacagctttctcgccaacagttgcagttactggaaaaaatgcctctctctgtacccggagacgacgcgccacaactggctttaccctggagtcagcctaatatcgccgaacgtcacgcgatgctgaataatgagttgcgtaaaatttcccgactggaaatggtgcttgcaattgtcggtaccatgaaagcagggaaaagtaccaccattaatgccattgttggtacggaggttctgcctaatcgtaatcgcccaatgactgcgctgccgacgcttattcgccatacgcccgggcaaaaggaaccggtactgcattttagtcatgtcgcgccaatcgattgtttaattcaacaattacaacagcgcctgcgtgattgcgatattaagcatctgaccgatgtgctggaaatagataaagatatgcgtgcgcttatgcagcggatcgaaaatggcgtcgctttcgaaaaatattatctgggtgcccagcctatttttcattgtctgaaaagtttgaatgatttagtgcgactggcgaaggcgctggacgtcgattttcctttttctgcttacgccgccattgagcatattcccgtgattgaagtggagtttgtccatctagcggggctggagagttatcccggtcagttgacgttactggatacccccgggccaaatgaagccgggcaaccgcatctgcaaaaaatgcttaaccagcagctggcacgcgccagcgcggtactggcggtgctggattatacgcaactgaaaagcatctccgatgaagaggtccgtgaggcgattttggcggtggggcaaagcgtgccgctgtacgtgctggtcaataagttcgatcaacaggatcgtaacagtgacgacgccgaccaggtgcgggcactgatttccgggacgctgatgaaaggctgtattacgccacagcagatatttccggtgagcagcatgtggggctacctggcgaatcgggcgcgctatgagttagccaacaacggtaagttaccaccgccagagcaacaacgctgggtggaagattttgcccatgccgcgcttggcaggcgctggcgtcatgccgatctggcggacctcgaacatattcgtcatgctgccgatcagttgtgggaagatagcctgttcgcccagccaattcaggcgttgcttcatgccgcttacgctaacgccagcttgtatgctctgcgatctgccgcgcataaactgttgaattacgcgcagcaggcgcgggaatacctggattttcgtgcgcacgggttaaacgtcgcttgtgaacaattgcggcaaaatatccaccagatcgaagaaagtttgcagctattgcaactcaatcaggcgcaggtgagcggcgagattaaacatgaaatcgagctggccctgacctccgccaaccactttctgcgtcaacagcaagatgcgctgaaggtgcagttagccgccttgtttcaggatgatagcgagccgttaagcgagattcgtacccgctgtgagacactgttacagacggcgcagaacaccatcagtcgcgactttacgctgcgttttgccgagcttgaatccaccctttgccgggtgttaaccgatgttattcgccccattgagcaacaagtcaaaatggaattgagcgagagtgggtttcgtcctgggtttcattttcctgtttttcacggcgtagttccccacttcaacactcgccagctgttcagtgaagtcattagccgccaggaagcaacggacgagcagagcacgcgtttaggcgttgtgcgtgagacttttagccgctggttgaatcagcccgactggggacggggaaatgagaaaagtccgacagaaacggttgattacagtgtgttgcaacgagcattaagcgcagaagtcgatctctattgccaacaaatggctaaagttctggcagagcaggtcgatgaatctgttacggcaggcatgaatacttttttcgctgagttcgctagttgtttgacggaattacagacgcgtttacgcgaaagtctggctctgcgtcaacaaaatgaaagcgtggtcaggctgatgcagcagcaattgcagcagactgtgatgactcacggctggatttacaccgacgcccagctgttacgcgatgatattcaaacacttttcacggcagaacgatattgaccaagacgttacttgacggccccggtcgcgtgctggagagcgtttatccccgctttttagtggatctggcgcagggtgatgatgcccgccttccacaagcccatcagcagcagtttcgtgaacgactgatgcaggaacttcttagccgtgtgcagcttcagacatggacgaacggcggcatgttaaatgcgccgcttagcctgcgtctgacattggtggaaaaactggcgagcatgctggatcccggtcatctggcactgacgcagatcgcgcagcatctggcgctgctgcaaaaaatggatcaccgccagcactctgctttcccggagctcccccagcaaattgccgccttgtatgagtggtttagtgcccgttgtcgctggaaggaaaaggcgttaacgcaacgaggcctactggtgcaggcaggtgatcagagcgagcaaatttttacccgctggcgtgctggggcgtataacgcctggagcttgcctgggcgctgttttatcgttctggaggagttgcgctggggggcatttggcgatgcctgccgtctgggaagcccgcaagcggtggcgttgttgctgggtgatttgctcgagaaagcgacacaacatctggcagagagtatcaatgcggcaccgaccacgcgtcactattaccatcagtggtttgcctctagcaccgttccgacgggcggggagcatgctgattttttaagttggctgggaaagtggaccacggcagataaacaacccgtttgctggagtgtgacccaacgctggcaaactgtcgcgctggggatgccacgactctgtagtgcgcagcgtctggcgggggcaatgctcgaggaaatcttctctgtaaatttggcgtaaataatcagttacatcaatgagtcctaaacgaaatccatgtgtgaagttgatcacaaatttaaacactggtagggtaaaaaggtcattaactgcccaattcaggcgtcaactggtttgattgtacattccttaaccggagggtgtaagcaaacccgctacgcttgttacagagattgcatcctgcaattcccgctccccttttgcggccgtcgcgctgatttttctggcgtttgcggaaatgggccaactctgcgaggaaagctatgctgaaaaggaaaaaagtaaaaccgattacccttcgtgatgtcaccattattgatgacggtaaactgcgtaaagccattaccgcagcaagtctgggtaatgcaatggaatggttcgattttggtgtttatggttttgttgcttacgcattaggtaaagtttttttcccgggggctgaccccagcgtgcagatggttgctgcacttgccactttctccgttccctttctgattcgaccgcttggcggactcttctttggtatgttgggcgataaatatggtcgccagaagatcctcgctatcactattgtgattatgagcatcagtacgttctgtattggcttaataccgtcctacgacacgattggtatttgggcaccgattctgctgttgatctgtaagatggcacaaggtttcagcgtcggcggtgaatataccggggcgagcatatttgttgcggaatactcccctgaccgtaaacgtggctttatgggcagctggctggacttcggttctattgccgggtttgtgctgggtgcgggcgtggtggtgttaattagcaccattgtcggcgaagcgaacttcctcgattggggctggcgtattccgttctttatcgctctgccgttagggattatcgggctttacctgcgccatgcgctggaagagactccggcgttccagcagcatgtcgataaactggaacagggcgaccgtgaaggtttgcaggatggcccgaaagtcagctttaaagagattgccactaaatactggcgcagcctgttgacatgtattggtctggtaattgccaccaacgtgacttactacatgttgctgacctatatgccgagttatttgagccataacctgcattactccgaagaccacggggtgctgattattatcgccattatgatcggtatgctgtttgtccagccggtgatgggcttgctgagtgaccgttttggccgtcgtccgtttgtgctacttggtagtgttgccctgtttgtgttggcgatcccggcgtttattctgattaacagtaacgtcatcggcctgatttttgccgggttactgatgctggcggtgatccttaactgctttacgggcgttatggcttctaccttgccagcgatgttcccgacgcatatccgttacagcgcgctggcggcggcatttaatattagcgtgctggttgccggtctgacgccaacgctggcggcctggctggtcgaaagcagccagaatctgatgatgcctgcctattacctgatggtagtggcggtggttggtttaatcaccggcgtaaccatgaaagagacggcaaatcgtccgttgaaaggtgcgacaccggcggcgagtgatatacaggaagcgaaggaaattctcgtcgagcattacgataatatcgagcagaaaatcgatgatattgaccacgagattgccgatttgcaggcgaaacgtacccgcctggtgcagcaacatccgcgaattgatgaataagctgaaacggatggcctgatgtgacgctgtcttatcaggccaattgaactcttaaggttcacttaatctctgacgcgcatactctcctccaggttaacggaggagagtgcaatgaaaaaccgtgtttatgaaagtttaactaccgtgttcagcgtgctggtggtcagcagctttctttatatctggtttgccacgtactgatctttcttcagccgtacccaggcccgcgtgccggaagtctcttgccggttttgcaggaaaaactgcccgtgatgcaactgtgtaatgcggctgacaatacttaaccccagaccaatcccgccataacggctgtccatacgtacaaacgctttactcaactccccgcatttactctcatcaatacctggtccttcatcttcaactgccatgaccgctccgtcatcttcttgcagcttaatcataatgttgctgccttgcgggctgtaacgatgggcgttttctaccaggtttcgcaataacatccgcagcagggttgcatcaccctgaacggtgatgtcggcggcgctctctggcaatagcagggtttgctgtcgctggtcgagcatggtactgagttcgtcatagctggggagaatgacatcttccagcagttttacatgttgataattaccggaagaaaaactctgtccggcacgcgccagttgcagcagctgggagacgctctccatcatctgatcaagccgtgccactaacggtgctacatcaatgtgatgcgttttcgccagcagttccagatgcaaacgcacccccgccagtggcgttcgcagttcgtgcgcgacgtcagcggtaaacaacctttcgttatccagcgtgctggtcaggcgactgaccagatcgtttaacgcgctaaccaccgcttcgatttcgagggtggcgctgtgaatggcaatgggcgttaagttgtcggcggtgcgcgcttccagctctttttgcagctccgccagcgggcgggtgatgcggcgtaccgcctgatagcagataaatagcgtcaggctgaccataaagacgccggggacaatcaggctggcgaccgcctcgcggatctcacgcatgatgtggcgatcgttgttgcgattgtcgcgtagcgcctgctcaaacagctgaatctgctcggtactttcatgccatagccagaagacgctgatcagctcaaacaccaacaaaatggccccgatggtcaatatcagccgttggcgcaggcttattggtcggcgcagaaaatgcatcagattcaattagttttcctcattcgcgaccagcatatagccaaagccgcgcacggtgcggatacgggctttgcccactttgtcgcgcagattgtggatatgcacttccagggtgttggtgctgggttcattgtcccagttatagatgtcgttgtagagaatttcccgatgcaccggactgcctgctttgagcattaaccgactcagcagagcatattctttgggcgtcagaatcaactcttcaccgcccatccatacctgacggcgacccatgttcagcgtcagattgccaacaatcagctcactttcgccctgattattatggcgtcgtagcagggcgcggatacgggcatgtaactcttccagcgcaaaaggcttcaccagatagtcgtcggcaccgacatccagcccggcgattttgtcggtcagcgtatcgcgagcggtgaggatcagtaccggcagggtatattttttctgccggatacgggcgagaaaatgcagtccatcttcgtcgggtaaccctaaatccagtaccaccaggctgtaatgacctgcctcaaggctttgttccgccatccgcgcggttgtcacgctatcgcacgcgtagccttcggtttgcgccgccagaatcagtccctgcaataacagcgtatcgtcttcaacaatcagaattttcattcactcactctcctgcaagtttgcagaatatcatccgcagcctggtaatacttcgtctcaacgccagttaatcccaatagcgtggagaataaattgtcttgactatagtgttgcgtttgcgcctgtttttgcaggcagttctggtcaacctgataccgtttttgataatcctcgctcagccacagcagcatcggcacctgtttttggctatccggggcgatggcataaggcagaccgtgcagatagatgccattttcacctaagctttcaccgtggtcagaaagataaaccaggctggtggtaaatttatcctgatgttctttcagcagattaatcgctttatcaacaatatagtcgacgtaaaccagcgtgttgtcgtaagtgttcaccagttgctctttggtacaggtctggatctcattggtgtcgcaggttggggtaaatttcctgaactgaggcggatagcggttgtaataggtcggaccgtggctgccgatggtgtgtaagacaatcacgccatcaccttgcaggttattgatgtactcttcaagcccgtggaacagcacttcgtcatagcattcgccgttgatgcactgatcaggtagattcagcgcggtgacgttctggtgaggcacgcggtcgcaggcacctttacagccgccatcgttgtcattccacagcacgttgatgcccgctcgctgaatgatatccagcacgccttcctggtgctgtgccagctcttctttgtagtgctcacgcggcatatcgctgaacatgcacggtacactaactgccgttgccgtgccgcaagatgcggtattagggaaatagaccacgttatctttcgccagccgcgggttagtttcacgcgggtagccgttgagggagaagttctccgcccggctggtttcgccgacaatcaggatggtcaaatttttacgtttttcgttctgcattaacgggttgcggtgcgcgtcttcaccaattcgcaccagcggcagatttgccagtcgctgatgggagtaccaactccagctggcaacaatgctgttagaggggcttaaggatttcaccagctctttgttattgcggaacaagctggcgtagtctttataaaacagtgcggcgaccagcaaaatcagtagtacagaaaccagaatattggctccacggaaaagaacactgcgcagacggctggtggcaggtttgatttttatccagcaggcaatcagcgcagcaagcacgccgctgaatcccagcgttaataacatttgcggtgtcatcagcgcataactttctgccggagtggtatcaataatattggcaatcatgctgcggtcgatgacgatgccgtaagtcattatgaaatattgtgcagccgcgccaaccagaataaacaggcaggccagtggtcgattaagccataagaaagagcttagtgtcaggacaatattaatcacgctgaaagcgacgaccggcatgctcaagaaaaccagtacgttatgcaggctatccagcggcagcgcctgcaacacctgtttaaaaaaggcaatattcaggcagatagagatataaaaagcggccaacaatagccaggcgagtaaattcaaagagggtctttttagtaggcgcttcaacatcacggtgtttccatcgaacaaagtgcgcatatgctcgcaaagcaaaattaagccaaccttaagttcttaaggttggcttttatgtttgctggattaaggggaattaatctttgcttattggtgcatctaagggatacgggtttttatgtagccggttgtaattcagcgcatacatggcggtgatgaccatcagggtgacaaaactccacataacctctttcgctccggaccccaccacggcccagatgcagtagaggaaggcaatggtagtaactgccagatatgccgggcgtgctttaccaaagtgaccgtgtccgagcagcagtaacgccgcacaggtgtaaagatatggcaccagtgtaaagatgacgctgacggaagaaaccagaccgaactctttggtcgcgtttggactaatgctgctgagctggaagatggtcatcaaaataccgacgataatcagccccgccactggcgtacccgctttatttacacgggcaaaaatcggtgggaacagtccgtcatcggcagcggctttcgccgtttgacccgccagcaacgtccagccgcccagactacctaagcaacccgcagctgcgcagaaggaaacaatggccccggcggtgtcacccaacgccatccgtgcggcatcaccgaatgggctagcagaaacgcgcagtgcggcattagggatcatccccataatcgcggtggtagaaagtacatagcaaacggcggcaatcaataccccaccaatggtggcgatagggacattgcgtttcgggtttttcaccacacctgcggcaacggaggcactttccacaccgatgaagctccacagcgtaacgttaagggtactttgaattgcaccgaaggtgcccaggccgctgacgttccatgccgccatataggtttcaccacggaaccagaaccagccaaatacggcaatcccgacgatggggatcagcgccagcacggtggcaactgcctgcacacgggtgatcattttcggaccgacaatgttcagcaggacgaagatccacagcaccacgacgcaggtgatggttaataccaatggatctttcagaatcgggaagaagtaacttaaatatcctacgccaatgaccaccatggcgatattgccgatccagcaggccagccagtagaggacgttggtttgataaccgagaaacgggccaaagcagcggcgggcgtaagcgtaagaaccaccaggacttgggtcgaggaagctcattttggcgtataccatgctgagccccagtgcaccgataatcgtcaccaaccatccataaatggcaatcccgccagtagaggccaggtttgcaggtaacagaaaaacaccactccccataatattcccgctcaccatcagggtgacggggattaagcccactttgtgagcatcagcatcgctagacataattaaactcctgcgaaggcgagcttcgtgacaataaattacgtcatatcatacgcctgcattcgatagttgaattattatcgaccgggttatcgctgatgccgttattaatatagctcttcgttaaggttaaaaatcaggcgacagtgcgttctctgtgctgactaacataatgcagcggcgtcataccgtagaagtctttaaagacagaaataaagtagctcgtactgttgtagccgcaggactgacttacctgagagatatttttaccgtccatcattaattcatttacggcataacgcatgcggcaggtggtgattatttggctataactggtgttttcgcttttcaactttttctttaacagacttgggctaagacataaacaactggctaccatactaagattccagtctttgtgaatatcgctttcaataatttgataaacgctgtcacttacacaattacgtaacatatacatcattaaactaacgaattttttactgtcgagaaaacgggatagcaccgtgaataataatgcgcgtgttcgttccttttcactctcagtttctgcgggcatcatgctgtgttgcgcggcaacgcgaaagacgtctggcgtcaggcatggcagggtgagtatgggcgtagcgctacgttgccatactggtatttggctgagatctttattcagaaaccggaggtaatctttgatgatgtcgtgactaatatgagcaaccaaagtgttgttaagagaggagacgtcgataatattattttcacaatttaataacgccatatggttagctttaaggctaataggttctttcccattcacccttatccagacatctttttcagtcaataaaacaatacaaggttggtcgctgcaaatcctcatacatgtactcctgagtgcgaataaaagaccagttctcgctaaagcaaagcgataccgggaaatggttatataattgtatgatgaatataaacatgcataaaaataacgagttttactaatagtacaaatttttatagtaatttctcatgtacatatttttttacaggataaataacaggcaaaaaaaagcgcggggtggggccgcgcaaaaagtatgacatttttgtttgcagcaatttttatgaaaacgttgccatactcaaaaggcctaaggccaggcggcgtaatgttatttaaacaattacgccttcagcggaatagtggttacgctttcacgcacataacgtggtaaataccgtcaataatttcagtcccttcagtttcgtgttcaaatccagggaaatggtggtcccaggattgcaggctgcgtaaataacttacttgcggactgtttttatcgccgaagttttcaccagacagcagcatcgggattcctggcggatacgggataacactgtttgccgcgatgcgtcctggcagattttcaatggataccagttcgacattgttgtcgacaatcgcgttgtacgcttcacgcggggtgacttccgccaccggcaggccggaataggcttcgttcaaccgtgcgccagggttgttttctttcagccaggcaaacatggtgtcacccagatcgtgaatccccatgttcgcgtaagtgtcaggatattgttcaacaagttccggcatcacctgcgccagcggtgtgttggcgtcatagtggcgtttgaaggagcaaagggtgttaaccagagttccccatttcccacgggttacgcccatagagaacaggaacataatttggaagtcagtggtgcgggtaggtacaatgccgtggcgaccaagccaggcagtgaccagcgccgccggaacaccggtttcttccagttcaccatcttcacccattcccggagcaaggatgctgactttaatcgggtcgagcatactccagttatccggaatatctttgaagccgtgccagctttcgcccggatgcattacccagcagtcctgaacggtggtcagcagtttggttggtgcgtcagcaaagtcataggttttgccggtttgtgggtcggtgacgacttctttgttccacggtttgaagaaccagctaccgtcagcggtgaactctttatatagccgcgccatcgcctgacggaaatcaaccgcttcgtcaatcacttcctgtgtcagactcaggccgctgttgccgtccatcatgctcaccgccacgtcgttggatgcgcagatggcatacagcggggaggtggtggcatgcatcatgtaggcctggttgaagcgggagaagttaatcgccccacgaccttcacgtacatgaatataagaagcctgactcagcgcattcagcagtttgtgggtggagtgggtggcgaaaacggtaggaccgttgtgatcgccaggttcgccgcgcatggcatagtgatcggcatagatcgggttgaaacgtgcatagccgtaccaggcttcgtcaaagtgcagacgatcggaggttttttccagcagatcctgcgcttctttagcgttataacacacgccgtcataggtgcagttggtcaccacgcagtaagacggtttttgcccggctttgtctttggtcagcgggctttcactgattttcttctgcaaggtttcaggttgcatttcctgcggatagattggcccgataatgccgtagcggttgcggcttggcaccatatagaccggtttcgcgcctgtcagcatcaaaccttgttcgatggatttatggcagttacggtcaacgaccacgacatcgttatcggtcatgcaagcctgcatgatggtgcggttagagccggaagtaccgacgactacgctccaggagcgatcggcaccaaatacgcgtgcggcatatttttcgctttcgccaaatgcgccagtatggtcaagcaaagaaccgagggaagttcgttcgatgcccatgtcggtgcggaacagattttcaccatagtagtcatggtagaaacgtccggcgggtgttttggtaaaaccaacgccgccctggtggcctggcgctgcccaggaatattcatggatgtcactatatttcatcagcgcgctgaacagtggcggcaacagctgctggcggtagcgggtcatcgcggcaacggcgcgtccggcgataaagtcggcggtatcttccagaatccaggcgaattcatcgacaagctccagcaggtcgcgatccattgcggcgagggctttttcccgatcgcccaacaggaagaccggcacgttttgttggcgctcatgaagcttaccgatcaattgtctgacgttttgatgttcgtccggatgttccatttgatagctgaacatcaggcagtcaatggcttcgttactagagagaatggcaaaaccatcatcaaaggaggtggatttaatcacggtaacattttgctggcttaaagcatctgccagacgctcaacggcgttaccgacccaggtgtcttgatggagaaactcgctttcaacaattaatactttcatcattgcttacccggttatgaaggaatcttcgttgcgggcaagtatcttccggccttttcgggctgtaaagcgcgtgaaaaacaaacatttttgaaatatttagttttataaacaatacgttatgtgattattttaaattattttcactgcttattatcgacggctaaactatttttttggctgatactgatatcgtctttagccgggaaacgtctggcggcgctgttggctaagtttgcggtattgttgcgggctcatgccgacatatttgccgaacgtgctgtaaaaacgactactactacgaaagcctgccgtcagggcaatatcgagaatacttttatcggtatcgctcagtaacgcgcgaacgtggttgatgcgcatcgcggtaatgtactgtttcatcgtcaattgcatgacccgctggaatatccccattgcatagttggcgttaagtttgacgtgctcagccacatcgttgatggtcagcgcctgatcatagttttcggcaataaagcccagcatctggctaacataaaattgcgcatggcggctgacgctgtttttgtgtgtgcggctggttttattgaccagaatcggttcccagccagagaggctaaatcgcttgagcatcaggccaatttcatcaatggcgagctggcgaatttgctcgttcggactgtttaattcctgctgccagcggcgcacttcaaacgggctaagttgctgtgtggccagacttttgatcaccatgccgtgagtgacgtggttaatcaggtctttatccagcggccaggagagaaacagatgcatcggcagattaaaaatcgccatgctctgacaggttccggtatctgttagttggtgcggtgtacaggcccagaacagcgtgatatgaccctgattgatattcactttttcattgttgatcaggtattccacatcgccatcgaaaggcacattcacttcgacctgaccatgccagtggctggtgggcatgatatgcggtgcgcgaaactcaatctccatccgctggtattcgctatacaggctcagcgggctgcgggtctgtttttcgtcgctgctgcacataaacgtatctgtattcatggatggctctctttcctggaatatcagaattatggcaggagtgagggaggatgactgcgagtgggagcacggttttcaccctcttcccagaggggcgaggggactctccgagtatcatgaggccgaaaactctgcttttcaggtaatttattcccataaactcagatttactgctgcttcacgcaggatctgagtttatgggaatgctcaacctggaagccggaggttttctgcagattcgcctgccatgatgaagttattcaagcaagccaggagatctgcatgatgtctgcacccaaaattacatttatcggcgctggtagcacgattttcgttaaaaatattcttggtgatgtgttccatcgcgaggcgctgaaaacggcgcatattgccctgatggacattgaccccacccgcctggaagagagccatattgtggtgcgtaagctgatggatagtgcaggggccagcggcaaaatcacctgccacacccaacagaaagaagccttagaggatgccgattttgtcgtggtggcatttcagattggcggttatgaaccttgcacggtgactgatttcgaggtctgtaagcggcatggtctggaacaaaccattgccgatacgttggggccgggcggtattatgcgcgcgctacgtaccattccgcatctgtggcaaatttgcgaggacatgacggaagtctgccccgatgccaccatgctcaactatgttaacccaatggcgatgaatacctgggcgatgtatgcccgctatccgcatatcaaacaggtcgggctgtgccatagcgtgcagggaacggcggaagagttggcgcgtgacctcaatatcgacccagctacgctgcgttaccgttgcgcaggtatcaaccatatggcgttttacctggagctggagcgcaaaaccgccgacggcagttatgtgaatctctacccggaactgctggcggcttatgaagcagggcaggcaccgaagccgaatattcatggcaatactcgctgccagaatattgtgcgctacgaaatgttcaaaaagctgggctatttcgtcacggaaagcagtgaacattttgctgagtacacaccgtggtttattaagccaggtcgtgaggatttgattgagcgttataaagtaccgctggatgagtacccgaaacgctgcgtcgagcagctggcgaactggcataaagagctggaggagtataaaaaagcctcccggattgatattaaaccgagtcgggaatatgccagcacaatcatgaacgctatctggactggcgagccgagtgtgatttacggcaacgtccgtaacgatggtttgattgataacctgccacaaggatgttgcgtggaagtagcctgtctggttgatgctaatggcattcagccgaccaaagtcggtacgctacctagccatctggccgccctgatgcaaaccaacatcaacgtacagacgctgctgaccgaagctattcttacggaaaatcgcgaccgtgtttaccacgccgcgatgatggacccgcatactgccgccgtgctgggcattgacgaaatatatgctcttgttgacgacctgattgccgcccacggcgactggctgccaggctggttgcaccgttaaaacgcgactaaacgctactgcgccgggggatttattccggcgcacacctctgacgataccaataacagaaggcgggcgttggtaacagcgacccgataccctatgagcatttcaatgactacaaaactcagttatggatttggagcgttcgggaaggattttgcgatcggcattgtgtatatgtacctcatgtattactacaccgatgtcgtcgggctgtctgtgggtttggtcggtactttgtttctggtggcgaggatctgggatgctattaacgatccgattatgggatggattgtaaatgctacgcgaagccgatggggtaagttcaaaccctggatcctgatcggtacgttggcaaactctgtaatcttatttctcctctttagtgcgcatctgtttgaaggtactactcagattgtctttgtttgcgtgacctacatcctctggggcatgacttacaccattatggatattcccttctggagcctggttccaaccatcacgctcgataaacgtgagcgcgaacaactggttccttatccgcgtttttttgccagtctggcaggctttgttacggcaggtgtgacgctaccatttgttaattatgtcggcggtggcgatcggggatttggctttcagatgttcactctggtactgatcgccttttttattgttagtaccatcatcactctgcgcaatgtgcatgaagtctttagcagtgacaatcaaccgtctgctgaaggaagccatctgacacttaaagccatcgttgcgctaatttataaaaacgatcagcttagttgcctcttgggtatggctcttgcttataatgtagccagcaacattattaccggctttgctatctattatttcagttatgttatcggtgatgcggatttgttcccctattatctgagctatgcgggagctgctaacctggtgacgttagtattcttcccacgcttagttaaaagtttatcccgacgcattttatgggccggagcatctattcttccggtgttaagctgtggtgttctcctgttaatggcattaatgagctatcacaacgtcgtcctcattgtgattgcgggtattttgctgaatgtgggaacggcgcttttctgggtattacaggtcatcatggtggcagatatcgttgattacggtgaatataaactgcacgtacgctgtgaaagtatcgcttactccgtgcagactatggtggtgaagggcggtagtgcctttgcggcttttttcattgcggttgtgttagggatgattggctatgtaccgaatgttgaacagtctacgcaagccctattaggtatgcagtttattatgattgctctaccaactctgtttttcatggtaacgctgattctctacttccgtttctatcgcctcaatggtgacacgctgcgcaggatccagatccatctgctggataaatatcgcaaagtaccgcccgagcctgttcatgctgatattccggtcggtgcagtgagtgatgtgaaagcctgacgtggacaatagctaacgaaaatggcctgatgcgatatgtttatcaggccacgtcttaatgtaatgctttggatttgcaaattttgtagaccggataaggaattcacgccgcatccggcatcaacaaagcgcaagttgttatccggttatcaagccaaagcgccgtagctggcggcaatgaaagcgagcgaggaatatcaccgtcgttaatgcgccaagcagcgcgcagaacatatcggattgcgtgtcccactggtcgccctgggtgccgagaaaatcatccgctccctgacccattgccagcgctgcccaccactcgattaattcatacatcgcgcttatcgccagcgccacgcagcagaccaggaacgccaccattttacgtccgcgcacgtacatcccgcgaacgagaatttctcgtgccaccagtgcaggcaccagcccctggaaaaagtgccccagcttgtcatacggattacgactcaaccccagccattcctgcacctcaaaaccaacggggactttcgcgtaggtgtattgtccgccgaccatcaggatgatggcgtgaaggaaaatgagcgtatagagcagcggcgttaacggataacgtctggcggtggcaagcagtagctgcacgacaataatcaccggtgtcacttccatcagccaggtgagtttgtcatgggcgctaatgccggtataaatcaggattaacgttagcgtcagtgcgctggtgttaagaattaacggcttgagtgtgcgggtcatggtgagttcgcaaatcagggaaaatactgactattcaccagcaagcgtgaaattacaatcgcaaaagaggtggccagggggatcacctggcagcatgctgccaggcgctgggccgaagaggttacttagtgcagttcgcgcactgtttgttgacgatttgctggaagaagtcgttacctttgtcatcgaccaggataaacgccgggaaatcttctacttcgattttccagatagcttccatacccagctccggataagcgacgcactccagatgcttgatgctctgctgcgccagtaccgccgccggaccgccgatgctaccgaggtagaagccgccgtgtttatgacacgcgtcggtaacctgctgactgcggttacctttcgccagcatgatcatgctgccgccgtgggattgcagcagatccacgtaggagtccatacggcctgcggtggttgggccaagactaccacttggataaccggcaggggttttcgccggacccgcgtagtagatcgggtgatctttgatgtactgcggaagttctttaccggcgtcaatcagctctttcagcttggcgtgtgcaatatctcggcccacgataatggtgccggtgaggctcaaacgagtggataccgggtattggctaagctgggcgaggatctctttcatcgggcggttaaggtcaactttcaccgcttcgccttcaccggcctggcgcagttcttgtggaatgtactggcctgggttgtgttccagtttttcgatccagataccttcgcggttgattttcgctttaatgttacggtcagcggagcaggagacgcccatgccgaccgggcaggatgcgccgtgacgtggcagacggataacgcgaatgtcgtgcgcgaagtatttaccgccaaactgcgcgccaagaccgagtttctgggcctcttccagcagttcctgttccagctggacatcgcggaacgcctgaccatgttcgttcccttccgtcggcagttcatcgtaatagtgagcgcttgctaacttgacggttttcaggttggtttccgcagacgtaccgccaatcacaaacgcgatatggtacggcgggcaggctgcagtaccgagggtacgcattttctcgacgaggaagtttttcagtttgccgggagtcagcagggctttggtttcctggtagagatacgttttgttggcagagccgccgcctttcgcaacgcaaaggaatttgtactcatcgccatctaccgcgtacaggtcgatttgcgcaggcaggttagtgccggtgttgacctctttgtacatgtccagcgccgcattctgactatagcgcaggttatcttcgatataggtgttatagacgcctttgctcagcgtttcttcatcaccgccgccggtccacacgcgctggccttttttaccgacgatgatcgcggtgccggtatcctggcaggtcggcagcacgcctttggcggcgatttcggagtttcttaagaattgcagcgccacgtacttgtcgttttcgctggcttctggatcgtgaagaatagccgcaacctgtttctggtgtgccgggcggagcataaaagaagcgtcgtgaaaggcttgctgcgccagcagggtcagggcttctggttccactttcaggatggtttcgccgtcgaagtcggcaacgctaacgtaatcggaagtgagtagatagtattcggtattgtctttccccatcgggaaaggtgcctggtagataaagggtttgttactcatagcttccagcctgtaactctgtatttgttattcgaaaatggcgtgccgcgtagtcacgggcggcacgcaaagtgcatttataagaacccgtacatcgcggcgaagatccagccgaagacgcagcttacgctcacaccaatcaaccccggcagaataaagctgtggttgatgacgaagcgaccgatgtgggtggtgccggaacggtcaaactgaatcgctgccagatcgctcggataagtcggcaggatgtaataaccgtagcaagccggtgcactagccacgatgtatgccggatcaacgccgatcgccagcgcgaccggaacaatcgccgccagcgccgcagcctgagagtttacaaacttggaaaccagcagcagaacaatggcataggcccacggatactctttcaccatttcacccagtacgccctgaatttcagacatatgcgcaccgaacatggtttctgccatccatgcgataccgtacaccgccacgatggcgatcataccggaacggaagacttcgtttttactgatagacgcgggattggttttggtcaggataataatcagcgccccggtcagcagcataaacatctgaataaccagtaccatgctcagcggtttgccgccgaaggatggacgcaggtcgctatcagcaccaagaagggcgactacagcgattgccccgaggaaaatccacattgccagccagttgcttttcggcagttttttatccagcagcgtcgcggtatcaccgtaaacatactcacggttttccggtacggagatgaatttctggaactcttcgtctttatccagatctttaccgcggaaccagctgaagataccgatcgccaggataccgattaacgtgcttggaatggtgattgccagcagatcgaggaactcaagatggcgaccatcaaaggtgacattacccagcatcgcaaccagagacacgaccgcaacgctcaccggactggcgataatccccatctgtgcaccgatagaacttgccgccatcggacgttccggacggatgttgttcttaatggcgacgtcgtagatgatcggcagaatggtgtaaaccacatgacccgtaccgcaaagaatggtcagtgtacaggtcacaaacggcgcgacaatactgacatatttcgggttgcggcgcagcagcttctcggcaatttgcagcatgacatcaagaccgccgctagcttgcaaggtcgcgcttgccgccaccaccgcaatgataaccagcatgacatcaactggtggtttacctggctgaaggtggaagacgaagaccagaatgaccagaccgataccgcctaataaacccagcgcgataccaccctttctggcaccataaaacagacatatcagtattatgataagttggatagtaaataacatgtgtgaaccctcgcgataatcctatttaaatttttgctgaatagatcacagtcacgttctgttttgtatgaactgttttcagagcctgactaaatatccgtttggtcgttaccggctttagcaaatacctcacagtgaatattggctgattaaagcagcggcaaatttatgcactgtgataagcggctttttcagagagaaagactctctggcgatgggtttatagtttgtactgcgcagatgttaatgttttgtttgctgttatcttattgatatttatcggtctattttttgttctcagggcagatgtcattaggtttatagattaatctgatctacccatttgtgggtaaaaatacacataatgcgggtgacataatagttaattaacttttgttagcgttttgaaattaaaaacaccgttcacctgaagagatattaatttttagcgatgatggagggataattatatttgatctggcacaagttttactgatgaaggatgtaacttgtgccaggggtattttgcattacggtaataattattacttacagataaccagcgatccgttattggcaatattgtttcagtagactgtagtgttctgcctgaatacggtaacggtaaactggacgccccgtgacgccataatggatactggtgaacaagatgtggcagttgaccagccagatgaggtatttacggcaggaaacacggctaatgttaacctcgttggctagctcgtcggtactaaattcatagtcctgatgcgcgtcaatccactggcacagtgtgcgtaacgtctgcggcgttaagccttttggcaagcgacgaggatcctgttcgttggagctgctgccgtggattagctgatcaagctcggcctggtcataatactgatgtttttccagcgccattttcttttgccgccagccggtgagcgcctcttcaaagcgggaagcctggaagggtttgatcaggtaatccacgacaccgtaatgcaggctatctttaatggttgccgcatcggctgcggaggagatgacaatcacatcacttttgcaacgcgcgttatgcaggacaggcagtaaatcgagcccgttctctttttgcatatagatatcgagcaatatcaggtcgataggcgtatcgctattgaagataatctctttggctttctccagcgtgctggctgttccacagcattgaaagcctgggatttgtgctacgtatcggcgattcagctccgcgaccattgcgtcgtcatcgataattaatacattgatcatctgttgctcctctccccgtcccagggtatctggacaaaaaattgtgtgaaaatcccgggttcgctttccacggcgatgctgccgccgagattttctacctgttgtttgacaagtgctaaaccgacgcctcgctcgcttccttttgtgctgacacctttgtcaaaaatgtgatcgattttatcgggtgcgatccccggtccatcatcattaacttcacagtgcagccagccgtgacggtagtgcaatgttacgctaatttcgcctccgggttccggccctaatgcctccagcgcgttttctatcagatttcccaacgtggtaatcagcgtcgcgacctggtcctcactgccgctgtctggcagctggctttcactgtttaaaatcagcgtatggcctaaatcggtcgcgcggttaatcttgctgattaaaaaaccagcgataaccggagatttgatcttacccagcagagagccaatctcttcctgatagttattggctgttttgagaatgtaatcttccaactgcttataactcttcagatgcaataatccgagaatcacatgcaatttattcataaattcgtgggatcgttcacgaagtgcgtcagcatagttgaccagaccgtcgagtcgctgcatcagtttacgtacttcagttttgtccctgaaggtactaatggcaccgatgataacgccattactgcgcaccggaacggtgttgatcagtaatagccggtctttaatcgtaatctcttcgtcgcggcgcggggtaccgtcgcgtaacacttcgctgacatctaccacctgactccaactgtggcttagcgtgctcagtttctcatcgtcctggctcttacggtaattcagcaattcttgtgcggcatcgttgatcagcgtgacctcgccgcgatcgtccacggcaacgacgccttctttgatagactgcaacatggcctggcgttgctcaaacagcgtggagatttcgtagggttccaggccgaaaaggatttttttcagtaccttaaccagaatgcaggtgccaatcagtccgaccagcatgccaaataatacgctccagataatgctccagcgactgtcattgatctgttgggtcacacggcttaactcaaggccgatcgccaccacgccaatttgtttatgattttcatcgtagatgggggtaaatacgcgtaaagcctgcgccagaaaaccgcgattgatagcgacattttcttcgccattcagcgctttaaggatgtcatcacctttaaatggctgaccaatacgctgggcttcaggatggctgtagcgaagactttgcatatcggtaacgacaataaacagcagatcgttgcgtttgcgtacggcttccgcgatggcctggatgccactctcctgcggttttttctgcaagccctgacggatttccgggctgtcggcgagggtacgcgccactgccagtgccttgttggctagcccatctcgcgtcatatcactgatttggctgaagtaaatcagatgcaccaccaatagcacgctgaacagtaccgcactgaccattaagatcactgtggtactcaatttcatcggacgtttgcgtaacatgcggtagggcaaactatgtctcatcagcttccttgtgtgacaaatttcttaagcattatctctgatgaggcgggtaattcaaagggagtaagaatgattggctatataggggaagagactctggcaacggaaactgccagtgctgtatgaagattccggggctatgcttatagcgataatcatactgatgagagagggaaggtcatggatcaggcgctactggacgggggttatcgctgttataccggcgaaaagatcgatgtctatttcaacactgcgatatgtcagcattctggcaattgcgtacgtggcaacggcaagttatttaatctcaaacgaaagccgtggatcatgccggatgaagtcgacgtcgccactgtggttaaagtgattgatacgtgcccgagcggcgcgctgaaataccgtcataaataagcgagggtaaaatggaaatacgcgaaggccacaataaattttacattaatgacaaacaaggcaagcaaatcgctgaaattgtctttgtgccgaccggagagaatttagcgattatcgaacataccgatgtcgatgaaagcctgaaagggcaagggattggtaaacagctggttgcgaaagtcgtggaaaaaatgcgtcgggaaaaacgaaaaattatcccattatgcccatttgcgaaacatgaatttgataaaacgcgggagtatgatgatattcgcagttgatgggagagtacagagtcacgatatttttcattctctccgcgatgtgatgcaggagagcatctgaagggtagggggatgcacaaagaatgggcagagagcgcgtttttttgtcccaagtcatcccctttactgagcaaaaaaaagaatatctcctatatgagaatcatcaatcggggttaataagttttgcgtccccagagcgtttaatattgataggagtcatattatggaaggtaaaaacaagttcaatacttatgttgtttcttttgattatccaagttcttattccagtgtgttcttaagattaagaagtttgatgtatgatatgaatttctcctctatcgtggctgatgaatatgggataccacgacaattgaatgaaaactccttcgcaataacgacaagcttagccgcaagtgaaatcgaagatttaatcaggctcaaatgcttagacttaccggatattgattttgacctcaacattatgacagttgatgactatttccgtcagttttacaagtaaccaggaaggataagaagaacataaaaaatggcactattctctaaaatattaattttttatgtgattggtgtgaacatatcctttgtcattatctggtttatcagtcatgagaaaacacatattcgtttacttagtgcattcctggtcggaataacctggccaatgagtctgcctgtggcattacttttttctctcttttaagagctgtagttgagtggacccgctggttatcgtgaaacgaagcgtctctcctcaaaactggatttgcggaacgatgaacgaagcagtcgcctgactgcttcgttcattaaagtgaaatttatttctgtgggcgcatcgccgggaagagaataacgtcgcgaatagtatggctgttagtaaacagcataatcattcggtcgataccaatacccagaccagcggttggcggcagaccatattccagcgcagtcacgtaatcttcgtcatagaacatggcttcgtcgtcacctgcagctttagcattaacctgttcctggaaacgttcagcctgatcttctgcgtcgtttaattcgctaaaaccattaccgatttcacgaccaccgatgaagaattcaaaacggtcggtgatttccgggttaacatcattacggcgtgccagcggggacacttctgccggatattccgtaataaaggttggctgaatcagatgtgcttctgccacttcatcaaagatctctgtgacaatacgtcccaacccccagcttttctctaccgtaataccgatagattcagctaatgctttagcagcatcaaaattatccaggtcggccatatcggtttctggacgatattttttgattgcttcgcgcatggtgagtttttcaaacggtttgccgaaatcaaacacatgctcgccataagtgactttagtggtacccagaacctcttgtgccagggtgcggaacagactctctgtcagttcaatcaaatcgtggtaatccgcatacgccatgtagagttccatcattgtgaactcaggattatggcgaacagaaataccttcattacggaagttacggttgatttcgaatacccgttcaaaaccgcctacaaccagacgtttcagatacagctccggcgcgatacgcagatacatatctaaatccagagcattatgatgggtaataaacgggcgagcagatgccccacctggaattacctgcatcatcggggtttctacttccataaagccgcgcgcgaccatgaattgacggatagcggccagaattttactacggacaacaaacgtttgacgggatttatcgttagcgatgaggtccagataacgttgacgataacggacttcctgatcctgcagaccatggaatttatctggtaaaggacgtagtgctttagtcagcaggcgcagctcagtacagtgaatggaaagctcacccgtttgcgtcttaaacagcgtaccgcgggcaccgataatgtcacccagatcccattttttaaactgatcgttataaacaccttctggcaggctatctcttgcaacgtacagttgaatacggccaccgacatcctgcaacgttacaaaggaggctttccccatgatacgacgggtcatcattcggccagcaacgctgacttcaatgtttaaggattccagttcctggttatccttcgcatcaaactcttcgtgcaactggtcagaggtatggtcgcggcgaaaatcattgggaaacgccacaccttgctgacgtagtgccgccagtttttcgcggcgatttctcagttcatcgttaaaatcaatagcctcattggctccccgtgtttcttgttcagacattttggttcctctaaatccagctttcaatttagcgtagataaagagacagatcggtacactgtattatctgcctcgactattagtaactcagtttatcttatcgaaactaacgcttacctcaagttgatatcactaataaataaccatcaaaatggtttaaatgacttattaatctcgatttgttagtgttataaactaaaagttaatttattcataaccaattgtttttacgacagttaatcgttgctctcctgtatcatattcgtcggcgtgctaaacagaaaacgggtagcaaaggccaatacgacgatgatcgcgacacaagccaacgtccactctcccatctgagaaaagaatcgctggtaagctgcaattgccataccgctaatttggctctctgtcgtctgctgtgccacgacgcctgccagccagttggcgaccgcgcctgttgccagcatataaatcccggttaatacgccagacattttcagacgcgtgatttgcgcaatcgccaccgggtcaataaagagttcggcaaagcccattagcgccagcccggatatcatcacgcccatactcgcttgaccgtcagccgctgcatgtcgggcatcaaatgccaacaacataaagccacaagccatcagcagtaagccaaaggcaaacttcagccagacgcgcaatgtactgttgccgcggctttctgggctcgccagccaggccagtacaaccccagcgagcatcaccgcaattgcattcacgctctggaatagtgctgtaggtacttcaatattgaatgcctgacgattcacaaagcgatcgataaacaagctgatggtactgccgccctgttgtgccagtacccagaacaatgtcccgacaaacatcaacaatacaatttgccaaagagcacggcgatgttcggggaatttgatcatcatgcgggcaatgatttgtgcggcaatgaggcaaacgatcgccagcaaatatccggaccagtcgttctccagcagcagagtaaaaaatactggggctaaacagagcatcaccactaaccagctccatactggtaaggcaaatttgacactagtgagcgcttttttatccatactacgtgtggactggaaatgacgatgaccgcttaagaaaatcaacaaaccgataaacatgccgccacccgcaagggcaaagccaacatgccatccataccactgagcagccaggccgcaggcgattggggctgcgatagaaccgatattgcccgcagcatacagcaggctaaaaccgccatcacgtcgatgatcgttctcgtcgtagagctcgccaagcaaacagctgatgttacttttgaataaaccgtagccacaaataatgattgccagcgccagatacaggctaaaggtactatttgtatcaatacccagcaccacatggccaagggtcattaacagcgcgccggcaatcactgcagtgcggttgccgagcaggcggtcggcaagccagccgccgagaataggggtaacgtaaaccagagaagcatatgcgctgaacaggctgatggcatggttatcatcaaaaccaagctgatgggtgagatagagaatgagtaaggcacgcatgccgtaaaaactgaagtactcccagatttggatcgccacgatatagtatatcgcgcgcggctgactgggtgttttcatgtgttctccttatgagcaaaaaagggaagtggcaagccacttcccttgtacgagctaattattttttgctttcttctttcaataccttaacggtatagcggccatcagcctgacggtatgcaccgtgaatatcggtttcaaagcccggatagtgagcgccgatttcacacagcatctgcaggaactccagaaccggacggctttcttcggtgatcatttcacccggcattaccagaggaactcccggcgggtacggaaggatcatattggcgttaatacgacctaccatttcgtcgaggtaaacttcttcggtcataccgtgcagctctttctggaatgcagcatacggagtcattaccatcgtcggcagcacttcaaatgcgcgatacatcagatccggcagattgtggtgaacaatcagtttgtggatattctgagccagttcctgaatacgcatgttttcatagaattcaggatcttcacgatacagagacggcagcatgtttttcacacgcaggttcaggtcgaacgcacgtttaaagtcagtcagagcacgcagcaggctcagtgctttggtcttatcgataccgatgctgaacaggaacagcaggttatacggaccggttttctcaacaacgatgccatgttcgtcgaggtatttcgccacgatgctggccggaataccaaagtcgctcatggtgccgtctttttccatccccggagtcagcagggtgactttgatcgggtcaagatacatgtgctcgttatcgatgtttttgaagccgtgccaggtgctgtcagaacgcagcggccagcattcagtcgtatcgatatgatccggctgccatacatcaaagaaccagccatcagattccgttctcagacgtttgatctctttacggaatttgatcgcacgttcaatagaaccgttgatcagacgcttacctgcattgcctttcatcatcgccgcagcggtttcagtggacgccacgataccgtagtgcggagaagtggtggtgtgcatcatgtaggcttcgttaaaggtttcttcgtttacgtcacctttaacgtggatcatggaagcctgagagaacgccgccagcagtttgtgagtggactgggtttcgtaaatcactttcccttctacacggccaccgctcataccgcatttaccttcgtaaatcggactgaagttggtgtaaggcacccacgcggagtcaaagtggatggatttcacatccagtgttttcttgatgaagtcggtgttgtacagcagaccatcataggtagagttggtaattacagcatgtaccggccaggttgcgtttggtgtttctttcacgcgcttagcaatggtagcgtgctggaattcactctgtgggataccaccaagaataccgtaagcgttacgggtcgggcggaaatagattggcgtaacatcgctcatcatcatcaggtgggtcaggcttttgtggcagttacggtcaatcagaatggtgctgcctgctggagcagagtacataccaacaattttgttcgcagtggaagtaccgttggtcaccatgtagctgcggtctgcgttaaagacgcgagcgatatactgttctgcttctttgtgtggaccactgtgatccagcagagaacccagttcagatacactaatggaaatatcagatttcatggtattcggaccaaagaaatcatagaacaggctacctaccgggcttttctggaatgcagtaccgcccatgtgaccaggagtacagaaagtatatttaccttcacgaacatatttaaacagtgctttagtcagcggaggcagaatagtgttgatatattcgtcagtggtctgcttgatcttattagcaatatcttcagcagcacccagcgcatattcaaagaagctaatctgtaaacgcaggtcattcaggcttacatcgagagtggaatacgtattagcgaacgcgtacaacggcaggttctcgttcattttgctaatttcttcgcacagctcgagattatatttatcccagtcaaaaataacgccgcacagacgcgcattgttttcgatcagttttaataagtcgtcacggtcgttcgggtaaacaatctggaagttcagacgttcaagcgcgcgatgaagttcacggatgggttcttctttaaaataaacccccatgtgattcaatattgcaataacgttcatagtcatatctccaggtaaaaaaggcccctcccaacacatgggacaaaatgaaaggaggagcctcggaaaatacttttaattaatgtgcgttagacgcggtgtggttatccatactgtggctctggcgctcgtgcattttgcgagcgtagaacatcaggataatcaggctgacgatgaaggtacctgccagctcgaaggagcttgcgcccatcagcgcgatgaagcagaacacgcaacccagtacagagcagatcaggctgacaaagttgcggatgttaacgccttcaaaacgaatcaggtcaacgcaagagtagaaatacggcagcatagtcagcagtactgcgataccggtcagttcaccgaacaggtcagatgctttaccaccggcagagttcatcagagtgataaggatcatcagggcagtcattttcactgcagccagcagcagaccttttttcggaataccgttgctgtcgacttcaccataaactttcgggaagttaccgtcgttagcggcacgtacacctgcctggcctaccaacatcatccaggagcccagagaagtcaggcacgcaaaggcggtgaatgcagaaaccagcggcgcagcccagttaccgaggatagtactagcactgattgcaaacggagcaccggaagccgccattacagaagacggatacataccggaaagcacctgagtcgcagcgatgtaaacaatacctgctaaaccagtacccagcatggttgccagcggaacggtacgtttcgggtttttaaccataccagtacttacagctgcggattcaacacccacgaaggcccacaggcagagcagaatacttttaatgatcgcatgaccatcagtggtatccgcagtattccagttagctgcataagttgccgcatcaaaccaatgccagccaacaatagcagtcatcaccacaggaataagaaccagcaccagaccaatagtggttaaacggcttacccaagtaccgccgagcatatttacaaaggtaaatacccagacgatagcaatacaggcgatacccgccggaacaggatcatttaatactgggaagaaggtggaaagataagatacagcggtaataccaatcgccaggttaccaatccagttagcatggtaataaagaacacctgtctgaaaaccaaatgcaggggaaatttctccggcataagcaattgggccaccttgttgcgggttttttgttgccagtcgggcatatacatacgccaggctcattgcaccaataatagagataatccaaccccagatagcaataccaccgatacttgctaggttcgcaggtaataatgcaataccgctccccatcatattaccggcaacaacaccggtacaggcaaatagcccgatcttcttggcagaactcatgctcttctcctaatttcatttttgaatttggagtccgggtcatgatgtataactatttcctgaccagaccaaactggcgataagattactcacgaaaaaaggattaatcctaaagattaggtgaaataacacaaaagtttctgtaagtgagaacttgaggttttttattaacacatcaggatcgcaagttgatatcatgaaaagataaacatttaatgtttacaatggattgcgtgacattctctggttaaatttatgtaataaaaattatgcggcaaataaattgccgcaacatattataccaacaggaacatacaaaaactcaacaacaaatatttccgagcataaatcaacccggagttacttattcactagcaagaaatttgtcgagataaggtacaacataaggaacagaagtctggaatataccattttcaatccagtaaagggtgtttgcccctgggcgtaaattaaaggcggtgagatatgcatcagctgcttcccggttcatccccttcatttcataaaccttgccaagcaacacataatttagccaggacatttcaagatcaatgccagtatttatcgcctggtaagactcatctgttttaccttttaccagagcactgaccgcttttatttgatatataatggacaggttgttcaattccggcagtgtaacaatgttatctatttctgtgttcagtgctgctaattgtttttcatctaaaggatgttgagaatggcgcacgatatcaactaatgctttttctgctctcgcgtaggtaaattctggggaactttgaacaatctcacctaataattcactggcacggttcaaacttttatcatcgccatgcagtaaataatcatgtgcctgataaaaattagttaataacgcaccacgatgcggcaaaattttctggagcgtctcctgcattcgttgtggccacggttggtttaacgctttacttaaactctccagtaaatcattttgaatcgccagctgattaccgttagtgatgacataacgtttatccagcatggtactaccatctgcattgtctaccaattttatgctcataaagcattgttgagcacggtattggcgctgattaacaaacgcaatagataatgttttaccggaactgctcggttcatcaatgttgtagttgattttgtcatgcaccataaaggtggagaaggtgttaagacttgtcgccaccaaatcacccacgcctatcgcgtaagagagctgatacggggaactccagctgttacaacttttatttaccatattaatgtcaatatcgcgtggattgagcaaaatacggcttttgctcataggaagacgtgtatcaagactactaaacgctaccagtgctacacagatacctaagctcaacaggaaaaaaaaccatacccaaaaggtagtgaatcgtttgcttttaactggggattgttcaggtggcgttgcggtgttttgaatgttaagactgtgggagggagaatctgtggcaggaaccgcctctggtatagggggagggctagatagcattatttcctctccctcttcttcgctgtaccagataaccggcaccattaatttatagccgcgctttggtacagtagcgatatagacaggactatcttcatcattatcttttaaactcttacgtagttcactgatactctgcgtcacaacgtgattggtgacaatacttctcttccagacattatcgataagttcatccctgctaagtacttcgccactgtgttgagcaaagaaaaccagaagatcgattaatctcggctcaagggtaagttgacgcccattgcggctaatttggtttatggacggagtaacaagccattcgccaacgcgaactacaggttgttgcataatagaaactcattcgaaaagggaatgatgcaatgataattgccacaacctatttttaccatctatagatgggtttatttacatattattggtgaatgcaagacgttatttttaccagccataaacttcttgattacatagtattacgaaaggattttactgagaaccagaagtaatattccttaccatcaaaattcatcatctttgccaaagaaaaatgttcagaaaataatccatggaaaattgtccggagcacttactattttaatggattgttagtctttgcatgagcaagcgaactgatacatttctctttgttctcattcagaaaatctcatcagtcgccgttcagaccggtgttgtgctttatggatgcgttacgctcctgatgacgtcatttgacgttcaacagcatcacggggccgcacgacatttcacgtcagttagtgctatagctcaggaacaaattttcccgaattgggatatgcccgcaaattgctggtgatgtggggagaatctggttgagttcggtagaattgatttggaggcagaacgcttaaatcgtggcgtcctgaaacgaaaaacggacctccgtggaggtccgtttatatgaatttggtgcccggactcggaatcgaaccaaggacacggggattttcaatcccctgctctaccgactgagctatccgggcaacggggcgcattaaaccgtaatctgcacatctcgtcaacctaatttcagtaaaagcgattcaactgcttaagattgcggcaaatcgcttcttttctgtgtttctgtcaggtcaatgcaccaccctggcggcagcgggcgaagcgcaggatatcttccgccagccgatgtgcagtgtcgacatccgcctggctacgattcaccagcattcggcttaaacagccttccagcaccagttccatctgctttgctaccatcgccggatcgtcaacttccagtgtggttaacagttcgtgggtgaaatcgtaggccgcgcttttttgctgatcggccagttgatgaatagggtggccaggatcgggataaaacgtacaggcagcgataaatagacagcccggatagcggttgtttttaacgcactcgcttaacgcctgataacgtgccagcagcttttgttcggcggtttgcgtttcgtccagcatcagctgacgacgccagacatctatctgttggctaagataacgcagcgcatcgtagaggattgcctctttgtctggccagaagcggcgtagctcgtccagtggataatccacacgttcagcaaccatctccagcgtggtgttggcaatcccttgtaattctaataatttcagggcttctcccagtacatcttcacgttgcacgctattttcctccgtctttcccactgcaagtgtcgttcacggttggcgatcgcgcaaatgtgcgctgaaggtttcagcatccataaagcccgtgacgcgtgcttgtggatgctcctggccttgtccgtcaaaaaagagaattgtcggtaggccaaggacattaagatgctttaacagcgccacatcttgtgcgtcgttggccgtgacgttggcctgaagtaagaccgtgtctgctaacgctttttgcacctgcgggtcgctgaaggtgtatttctcaaactctttacaggcgacgcaccagtcggcataaagatctaacatcaccggtttgcctttggcttcaacgagcgcctgatttaactcatctaccgttttgatttgtgtaaagttgagatgcgtctgagtttgcgcggtatgcgtcgcaccaaatgcccaatcctgaagtgggcgcacgctaaccaatgccgctgccagcagaataatttgcacaatacgcatccagccgcgtttagcctgtaggctggtgataaaggcccagccaaagaatgcgacacccagcgcgctccacaagcgtaatccccatacatcaccaatcactcgctccagcaggaagaccggcagtgcgaggatcacaaaaccaaacgcggttttgacttgttccatccacgggccgcttttcggcagcaagcggttaccaaagacggtaattagcatcagcggcaggcccatgcccaacgcatagagataaagcgtgccgccgcccagccacatgttcccgctttgggcgatatacagcagaatcgcgctaagcggtgcggtggtgcatggactacagatcagtccggcaatcgcccccataacaaacacaccgccaggactgccgccctgttggcgattgctcatcaacgtgagacgtgtttgcaggctagaggggagttgcagggtaaacaagccaaacatactcatcgccagcaaggtaaagacgatggcgaggccaatgagcacgtatgggtgctgtagcgccgcctggaactgtaaccctgcggcggcaaccaccagacccagcgccgtgtaggtcagcgccatcccctgcacataaataaaggtcagcaacaatgctctggcagtggagagccgctgtttaccacccagcacgatgccagaaatcagtgggtacattggcagcacgcatggcgtaaaggcgataccaataccgatcaacaacgcccagagcgcggaaaagggcaattgcgcggtgggctgctcttgctgcggaacagacacaggctgtggcgctgcgttgttggcgaccacttcgcttaacggaacggttttggtttctggcggataacagaaaccggcatcagcacagccctggtaggtgacagttaacgtcgctcccgcactcgcctggttgatggtgacgggaagcgtcagccgatcgcggtaaatctcgcttttgccgtaaaactcatcttcatgccagacgccttgcggcagctgcacgtcggcaattttcgcgtgttccggcgtaatgcggatctgtttacggtagaggtagtaaccgtctttgatctgccaggtcagattaaggtcatgttggttttgctgaaaatcaaaagcaaaggcttgatccgcggggacaaattgactacgtcccggcgcgtcgaataatccggcaaaaacggaagtgctgcaaagtagcaggatcagcgtaaagatgcgttgagccatgagaggtaatctgtgtctccttatgtcagcgtaaagatgcgttgagccaactgaggtaatctgtgtctccgtgtgtaacaggtaaaaccagaagttccggggtttgatatggatgatgagacttcaggcattccagcagtgcctgctggtgagatacggtagtttttaaaatcatctgcacttcgtattcttgctccagcttaccttcccagtaatagagagaggtagcgccggggatcaaggtcgcgcaggccgccagtttttccgccagcactttggcggctaaatcctgggctgtcgcttcatctggtgccgtacatagcaccacgacagacgcggtattgctacttttttcatcaagcataaacacctcgcaagaacagatggaaccgcaagagagaggtcactatacaacggacgggggaaggatgttagtcggcgggaaagaaagcggggcgtgaacgccccgcgattgatcattacagcatgaagctacccagcacgaagccgaagcaaacggccagggcaacacccagagtacccgggatgaagaacggatggttgaagacgaatttaccgatacgggtagtacccgtgtcatccatctgtaccgcagcaaccagcgtcgggtaggtcggcagaatgaacagaccagacaccgcagcgaaagaagcaacagcggtcagcggactaacgttcagtgccagagccatcggcatcagtgcttttgcggttgcagcctgagagtacagcagagcagaagcaaagaagaagatgacggccagcagccacggatgaccctgaatcacttcaccagcggtatctttgatccagtcgatgttgttggaaacgaaagtatcgcccagccacgcaacacccaggatacaaatacaggcgctcatacctgctttgaaggtgctggagttgaggatgttgtcggtatcgactttacagataacggtggtcagagttgcaacgctgagcatgatgatcaggattgcgttggtggtgttcatcagcggtttttcaaccagacccatgcttgggctgttgatgattgcatagataaccacgccaactacgcccagcaggaacagccagacggacgtttttgcaccggatttgatttcaatctgcttttcaccgcgcagttcaaccaggccctcttccagacgcttgcgataaatcggatcgtcagagagtttggagttgaacagcatagtgaccaggaaggacatcaccagaaccgccagcagggtggacgggatgaccacggagagcagatggaggtagctgatgccatgaccttccatcacggaagacatgtaaaccactgccgcactgattgggcttgcggtgatcgcaatctgcgcggataccactgcagtagacagcggacggcaaggtttaacgccttgttccttcgcaacttcagcgataactggcagtgtcgccagagagatgttgccagtaccagcaaagatagtcaggaaataggtcacgatcggtgcgaggatcgtgatgtatttcgggttacggcgcagcagcttttctgtctgatgaaccagatagtccagaccgccagcaacctgcatggcagaaatagcggcgataaccgccatgataatggagatgacatcgaacgggatgttaccgggtttaacgccaatagcggcaagaaccagcacccccaatccgcctgcaaaaccaatacctattccccccaatctggcgcccaagaagatcgccagcaaaactatgatgagttctacaactagcatattagccttccttgttttttaacaagttgatattagattgttatttttaagttactgctcacaagaaaaaaggcacgtcatctgacgtgccttttttatttgtactaccctgtacgattactgttcgctttcatcagtatagcgttttgctttgtaagccgggtgcatcagattctgtacggagaaaatatcgtcaagttccgcttcagtcaacagaccgcgttccagaacgacttcacgtacactcttaccggtttcggcacagattttacccacgatgtcaccgttgtggtgaccgatgaacgggttcaggtaagtaacgataccgatagagttgtaaacgtaaccttcgcacacttctttgttagcagtgatgccgttaatgcatttttccagcaggttgtagcaagcgttggtcagaatgtgaacggattcgaacatggcctggccaatgaccggctccataacgttcaactgcagctgacctgcttctgctgccatggtaacagtggtgtcgttaccgatgactttgaagcatacctggttaaccacttccggaacaaccgggtttactttagctggcatgatggaagagcccgcctgcagttccggcaggttgatctcgttcaggccggcacgtgggccactagagagcaagcgcaggtcgttacagattttggacatcttcacagccaggcgtttcagcgcgccgtgaaccataacataagcgccgcagtcagaggtcgcttcgatcaggtcttcagccggtacgcatgggaagccagtaacttcagccagttttttcactgccagcggagagtactctttcggcgtgttcagaccagtaccgattgctgttgcaccaaggttaacttccagcagcagttcagcggtacgttggatgtttttcacttcttctttcagcaggatgctgaaagcgcggaattcctgaccgagggtcatcggtactgcgtcctgcagctgggtacgacccattttcaggatgtcctggaattcgacagctttacgttcaaagccttcacgcagttggttaatcgcatctaccagcttaatcagggaagagtaaactgcgatacggaaaccggtcgggtaggcgtcgttagtggactgacatttgttaacatggtcgttcgggttcaggtactgatattcacctttttggtgacccatcagttccagaccgatattggccagcacttcgttggtgttcatgtttacggaagtacctgcgccgccctggtagacgtctaccgggaactgatccatgcattttccgttgttcaggacttcatcacatgcggcaatgatggcattcgctacacttttaggaatggtttgcagctctttgtttgccatagctgcggcttttttaaccattaccataccgcgaacaaattcaggaatatcactgattttgttgttgctgatatagaagttttcaatcgctctcagagtgtgaacaccatagtaggcatcagctggaacttccctggtacccaacagatcttcttcgatacgaatgttgttactcatgtgaaccttctttttcaagctgccaatgatttgctttaaacacacagaatatatgtggtttcgaatgtttttcgaccgacgattatcccctgcatcgaccgaatacccgagatcatatgctgcttgaggatttctaccgtaatctggatcactttaagtgtcggtttttaccccttaattattaatttgtgaaatagatcaccgctttgggattactaccaaaaatagttgcgcaaacatcttgaaattttgctaatgaccacaatataagctaaacgcgattcgcaacccattcaggtagccggggttaaccggctgctattacaggagaaacctttgcgctggttaccttttattgccattttcctttatgtctatattgagattagtatctttattcaggttgcccatgtattgggggtattgctgaccctcgtgctggttatattcacgagtgttatcggtatgagtctggtacgtaaccagggctttaagaatttcgtgctgatgcagcaaaaaatggcggcgggtgaaaacccagcggcggagatgattaaaagtgttagcctgatcattgctggtttgctgcttttattaccgggcttttttaccgacttcctcggtcttctacttttattgccgccggtgcaaaagcatctgacagtgaagttgatgccgcatttgcgcttttctcgcatgcctggcggcggttttagcgccgggaccggtggcggtaatacttttgatggtgagtaccagcgaaaggatgatgagcgcgaccgccttgatcataaagacgatcgccaggattaatgtcgaaacgccggattatgtggttatgccattttccggcgtttttcgttttggcagcaacagccataaccccgccagcatgatcagcgcatagagacttttccagccgaccattgccagtaacagaacgcataacagcccgccaaccaccgccagtagtcgataacgtccttgcaataatttacagcctgccagcatgcataacagataaatcataataaagatgccattggcataaataataagagcgtccagattgatctctaaagcatgaatcaccaaagtgctcaccacacagcagccgagcaccgcattgagggcattattcgggatatggcgagaagagaggcgtgccaggtagtggtcaggattatgttgcgcctggctccagaccaggcgggcgaagctctgtatataaatgttgagactggcaaagcaggccagatagccaatcacgcaggcaatccataacgctcctacaccgaacaactgcactacaatttttggaaggcttgctgccgccgccattttttcaccataggcgtcgaagtgtaagacgactaccgtacagccccagtagactaatcctgccagcagcagaccaatcatcaaagcacgaggaaaatcacgctctggatttttaaattcgctggcgagatgggcaaatgcctccagaccgacaaaacaccagaacatcacacttaacgcagcaaataacccggtaagttcgatattaccaggtgccggaaaggggatattcgcaggtttgatatcgcccgcccaccagatagcgacaatcagcgcgacgataagtccggcaataacggtttgtagattagcactggaactggcaccgcgagtaccgatataccacaccagcgccagcgtaccgagttctgccaacaacagttgccagctatgccagccaaacatcgcctggccgaacccggcggcaatttgtagtgcggcaggcaaacccacgggaatgacgcttaaaaacagccagccggtgactcgctcaagccggctaccaaacgccataccgacgaagtgcgcgacgccgcctgcgctgggatagtggcgacccagaatcgcaaacacaatcgcaatcgggaacactaagataatcaaaacgggccacgcccacaggctgttattgcccgctaccagcgcagctaacgcaggaacggcaaacacgccagtgcctaataaactcgtgcttagcaggccaatgccctgggccagccccagttcttgtttgagtccactcatgggttgatgtccgattgcgcccaaattttgggcaactgcgtagattttcgatggtagcacaatcagattcgcttatgacggcgatgaagaaattgcgatgaaatgtgaggtgaatcagggttttcacccgattttgtgctgatcagaattttttttctttttcccccttgaaggggcgaagcctcatccccatttctctggtcaccagccgggaaaccacgtaagctccggcgtcacccataacagatacggactttctcaaaggagagttatcaatgaatattcgtccattgcatgatcgcgtgatcgtcaagcgtaaagaagttgaaactaaatctgctggcggcatcgttctgaccggctctgcagcggctaaatccacccgcggcgaagtgctggctgtcggcaatggccgtatccttgaaaatggcgaagtgaagccgctggatgtgaaagttggcgacatcgttattttcaacgatggctacggtgtgaaatctgagaagatcgacaatgaagaagtgttgatcatgtccgaaagcgacattctggcaattgttgaagcgtaatccgcgcacgacactgaacatacgaatttaaggaataaagataatggcagctaaagacgtaaaattcggtaacgacgctcgtgtgaaaatgctgcgcggcgtaaacgtactggcagatgcagtgaaagttaccctcggtccaaaaggccgtaacgtagttctggataaatctttcggtgcaccgaccatcaccaaagatggtgtttccgttgctcgtgaaatcgaactggaagacaagttcgaaaatatgggtgcgcagatggtgaaagaagttgcctctaaagcaaacgacgctgcaggcgacggtaccaccactgcaaccgtactggctcaggctatcatcactgaaggtctgaaagctgttgctgcgggcatgaacccgatggacctgaaacgtggtatcgacaaagcggttaccgctgcagttgaagaactgaaagcgctgtccgtaccatgctctgactctaaagcgattgctcaggttggtaccatctccgctaactccgacgaaaccgtaggtaaactgatcgctgaagcgatggacaaagtcggtaaagaaggcgttatcaccgttgaagacggtaccggtctgcaggacgaactggacgtggttgaaggtatgcagttcgaccgtggctacctgtctccttacttcatcaacaagccggaaactggcgcagtagaactggaaagcccgttcatcctgctggctgacaagaaaatctccaacatccgcgaaatgctgccggttctggaagctgttgccaaagcaggcaaaccgctgctgatcatcgctgaagatgtagaaggcgaagcgctggcaactctggttgttaacaccatgcgtggcatcgtgaaagtcgctgcggttaaagcaccgggcttcggcgatcgtcgtaaagctatgctgcaggatatcgcaaccctgactggcggtaccgtgatctctgaagagatcggtatggagctggaaaaagcaaccctggaagacctgggtcaggctaaacgtgttgtgatcaacaaagacaccaccactatcatcgatggcgtgggtgaagaagctgcaatccagggccgtgttgctcagatccgtcagcagattgaagaagcaacttctgactacgaccgtgaaaaactgcaggaacgcgtagcgaaactggcaggcggcgttgcagttatcaaagtgggtgctgctaccgaagttgaaatgaaagagaaaaaagcacgcgttgaagatgccctgcacgcgacccgtgctgcggtagaagaaggcgtggttgctggtggtggtgttgcgctgatccgcgtagcgtctaaactggctgacctgcgtggtcagaacgaagaccagaacgtgggtatcaaagttgcactgcgtgcaatggaagctccgctgcgtcagatcgtattgaactgcggcgaagaaccgtctgttgttgctaacaccgttaaaggcggcgacggcaactacggttacaacgcagcaaccgaagaatacggcaacatgatcgacatgggtatcctggatccaaccaaagtaactcgttctgctctgcagtacgcagcttctgtggctggcctgatgatcaccaccgaatgcatggttaccgacctgccgaaaaacgatgcagctgacttaggcgctgctggcggtatgggcggcatgggtggcatgggcggcatgatgtaattgccctgcacctcgcagaaataaacaaacccccgggcagaaatgtctgggggtttttcttttggtcatctttctagtataagattcagacacggacgacgcgagtggcgtccagctcattgattatggggaataacatgcacgtaaaatacttagcagggattgtcggtgccgcgctactgatggcgggttgtagctccagcaacgaattgagtgctgccggtcagagtgtacgcattgtggacgagcagccaggcgcagagtgccagctgattggtactgcgacaggtaagcaaagcaactggctttccgggcaacacggagaagaaggcggttctatgcgcggcgcagcaaacgatctgcgcaaccaggcggctgcaatgggcggtaacgtgatttatggcatcagtagcccgagccagggaatgttgtccagttttgtcccgacggatagccagattatcggtcaggtttataagtgcccgaactgatgtgatccagaggctgggtgacaaacgtataattgcctgatgcgcttcgcttatcaggcctacataaggcattgcaactgattgaatgcttgagaatttgtaggccggataaggcgtttacgccgcatccggcatgaccaacgatcacgttatcagtcatttcaggctggatggctccagcctcgcattagcaaagatgagattatttcgcctgtggtgcagttttgctggtggattgaacacgtaagtgatgcagcgcgcgtaagcattgatcctgggttagcggttgggcgttattcgccgctacggtgcgaacatagacctgacatggcacacccgcgagttttttcagtcgtgggctgaaatcaagcattcggcgagtgatcgcttctatttctttacccggcgttgcttcacgcgttttcaccactgcgccgctaaattgttctttgccactttcatctttaaagcggtaaagcaccgccagataatggtcgaacaagttatgtttccattccggttgggaataggtgtcatattccagattgccattgtcctggcagtcaacgtcgtataacggcaggaaatctaacagactggtaatacgtaatgccagttcacgcatttccgcattattaattgcatgaatgattgctcgcgccagcatttcaatctgcaactcattgacgactaactcacatttgctaccgtcatgtagcgttaatacgaaggtaagattttcgccttgattatcggtaagttccagcgtgttaacccgacgattaatatcggcatttttaagctcatcaaccagaatttctgggatgttttctgccattttcttaatgactttatcgcgagcttgctcatactgaaggtgtgcagcagcatccagtttatgcttttgatgcagacgactttccagcgcaatcagcaggtcgcgcagttccatgacagacataaagaacaagctttctttattgcgaggttctttaattttcagcgccagtgcaatgaaattattactcttgcgaataacaccggtattaacacccttgatgcttatggccatgtaggttctccctaaccatttctcaattaaataattaattttaatttataagccagataaatgggcttggtagtaatagttgttaaaataacataaatagccgtactcactctatataaacagaaaagaaaggttaattattggtgttagctatataaaaagtaacaacagcaatgcatatgaataattaaaggttatgcaacgggcaaagattaaacttcccagtttaatgacaggttgctgtacttgcgtttgttgctcttgccggatgcagcgtaaacgccttatccggcctacagttcattgcaaatccattcaatttcaatgcacgatgtaggcctgataagcgtagcgaatcaggcaattttaatgtttaacttccctgtttaatcagttactgctggcgtagctggagatccagcggcgttttgctgggttcgccgccaatttctcgcgccagtttcggcaccagatatccgctcaccagtgtcagcaactcacgcataatctgccgtgcttcgtcatcactcaccataaaatgcgccgcgccctgtactttatcgagcacatgcaggtaatacggcattacgccggcatcgaacaacgcattactcaggtttgccagcgtttgtgcgttatcgttcacatcacgtaacagaacgctctggttcagcaaagtaacgcctacccggcgcaacttagccatcgcctgacggaatgtttcatctacctcattggcatggttgatgtgattcaccagcaagatttgcagcgtagaacgggcaaagcattcaaccagcgcctcggtgatacgtgccgggatcacaatcggcagacggctgtgaatccgcagacgttttatatgcgggatggcttccagttgtgtgagcaaccagtccagctcgtgatctttcgccatcagcggatcgccgccggagaaaatcatctcgtccagttccggatgcgcagcaacatactcaagtgcagtttgccagttacgcttgttgccctgattttcggcataggggaagtgacgacggaagcaatagcggcaatttaccgcgcagccgcctttgaccagcaaaagcgcccggttgtggtatttatgcaacaaaccaggcactacgctgtgctgttcttccagtgggtcggtggagaatccgggcgcgatgacaaactcatcttggctggtaagtacctgacgcaaaagaggatcgtccggattgcctttctccatgcgatcgataaaactgcggggcacacgcagggcaaaaagctttttggcgctgcgtccggctaacagtttttcctccgcgtctatattcaaaagacgcagaagttcatcaggatcggtcacaacatcggcaagttgcgttaaccaatcttctctggatggggtatttagggttacaatatgcgccattttgtggcttagctaccaattaacaaatttcagagggccttatggcaacgtactatagcaacgattttcgtgctggtcttaaaatcatgttagacggcgaaccttacgcggttgaagcgagtgaattcgtaaaaccgggtaaaggccaggcatttgctcgcgttaaactgcgtcgtctgctgaccggtactcgcgtagaaaaaaccttcaaatctactgattccgctgaaggcgctgatgttgtcgatatgaacctgacttacctgtacaacgacggtgagttctggcacttcatgaacaacgaaactttcgagcagctgtctgctgatgcaaaagcaattggtgacaacgctaaatggctgctggatcaggcagagtgtatcgtaactctgtggaatggtcagccgatctccgttactccgccgaacttcgttgaactggaaatcgttgataccgatccgggcctgaaaggtgataccgcaggtactggtggcaaaccggctaccctgtctactggcgctgtggttaaagttccgctgtttgtacaaatcggcgaagtcatcaaagtggatacccgctctggtgaatacgtctctcgcgtgaagtaatgcggttgtggtgcggcctgcaggctgcaccatcacttattcaggtcagagatgatgaaacgccttatcgttcttgttttgcttgccagcacgctgctcacgggctgtaacaccgctcgcggtttcggcgaagacatcaaacatctcggcaactccatctctcgcgctgccagctaatttttcttctcttccgaaaaatcatcagattcccatcatttttggcgatgttgtctattattaatttgctataggcaaacataaataacattacctaaaaggaagacgttatggtgaagaagacaattgcagcgatcttttctgttctggtgcttagtacagtattaactgcctgcaacaccacgcgtggcgttggtgaagacatttctgatggcggtaacgcgatttctggcgcagcaacgaaagcgcagcaataagcaataacggtacgacagctgtgtcgtgccgtttgttttttctgcgatagtcacaaaggtaatagttgaaattcccctgccacctggcaaaatatccgttcaaccatcagctttgcaggacgacctgcaaacgcctcttttcaccggggacggccccaattctccggagcctgatatgtcctggattatcttagttattgctggtctgctggaagtggtatgggccgttggcctgaaatatacccacggctttagtcgtttgacgccgagtgttattactgtgacggcgatgattgtcagtatggcgctacttgcctgggcgatgaaaagcttaccagtagggacggcttatgccgtgtggacgggtattggcgcagtcggcgcggccataaccggcattgtgctgctcggtgagtccgctaacccgatgcgcctggcgagtctggcgttaatcgtattggggattattggtctgaaactcagcactcattaactaccaggctgctgtacccaaataaatttactgacatcaaacccttcccgggtcgcgactgccagcatctcctgtttcacttcgtcagaaatggttggcgtgcgggagagtatccacaggtagtcgcggtccgggccgcaaaccagcgcatggcggtattcccgatcgagtgcaataacgttataaccgccatagaaaggaccaaagaaactcactttcagcgcagcgcgagttggtgcgccggtaaagtacgctttcccttcactctgctgccacattcctctgtcagggttatagcctttattaatgacattcaggccgccgtcatcacgcaggctgtatgttgcggtgactttttccagtccacgttcaaagcggtgatcaaaacgggcaatctcataccaggtaccgagataacgtttggcgtcgaaattatttactacggtcacgccacgcggcggcgtaggagaactgcaggcaacgaccagaaatgcagctgtcgctgcggcaacgagagggagcaggcgcataaatgtttccttactggtttttttctaagtgtagatgacagcaaggaaaagcggagaaaaggtccgaaaattcggacccgatggaattttactgtagagcgttaagaatctgccaggcggcgtcgactctcgctggattgggatagtttttgtttgccagcatcacgatacccagctctttttctggaataaacgcgacatagctaccaaatccgccggtcgcccctgttttatgtacccaacttgcgcgtactgcaggagttgggggcgtaatcgcttttacggggcgtgctgccagtgcaattttattgtcactgccgttaatgatgctgtcaggatttaccggccagtccagcatttcccagcccaggccctgatacatatcgccggtttgccagtagcgagattgtgccagttgtatcccttgttgaagcgttttctcattgatatcaaggggttttaaattgctttgcacccagcgggccatatcttcaatggtgctcttcacaccataagcttcagcatctaacgccccagggctaacatgcactgccttaccttcgcgatatccccaggcgtaattcttttcttctgcgggcggtacattaatccacgtatggttgagtttgagtggctggaagacacgagtttgcatcgcctgctcaaaactcaaaccagacggcttcacagccagtgcgccgaacaaaccgatactggagttggcatacagacgttgtgttcctggagcccatgcaggctgccagttttgatagaagcgcagcaagtcgctactggatttcacctcatccggcacctgcaatggcaggccgccagcagtgtaggttgcgagatgtaatagtgtgatcccattccactgtttagcggtaagttcaggccagtattttgttgtgggatcgcttaacttgatttcccctcgagcaatagcgtcgccaccaagcacgccagtaaatgttttgctgacgctacctaactcaaacaacgtttgctgtgtgacgggctgctttttggcgatgtccgcatagccccaggtaaagtaataaggtttaccctgataaattaccgccaccgccatacccgggatcttttgttgctctataagcggggtaattgtgcgatgcacaatatcgttgatttgttgaggggcagcaaatgtggagcaagaggcggtaattaataaggcgcagagcgtcgttttgaacatagggtctggtttccatacaaaacggcccgccataggcgggccggatttacattggcgatgcgttagattgtaacgacaccaatcagcgtgacaactgtcaggatagcagccagaccgtagaaaacccatttgcccgcaggtacgtggattttcagatcgtgcatcgcgtggtgcatacggtgtaaaccacaccacagcggcagaacgatcatcaggaacaggaatacgcgaccaatgaagctctgcgcgaacgccagaacgcgctcgtagctcagcgcatcacccggaaacaaccccagtggcagcagaatacccaccagcaggatcatcaccggcgcaatgatggcgctccacataccaccggccccgaagaggccccagaataccggttcgtcagaacgctttggatttggattaatcatctcaggctccttaccagtacagggcaacaaacaggattacgatggtggcaaccacagttaccgcccagagacttttgataattggctctggtcccattttttcgtcttttacaatgatattggccgctttcggtgccagttcaaaccaggttttggtgtgcagcagagctgccgccagagtgatcaggttaatgatcacgataaccgggttttgtaaaaagtcgacgaatcccgcccaggcttccgggccatttttcagggcaaacagcccgaaaatcagttcaatgctgaaccacacagccggaaccgccgtgccttcgcgcagcatgtaaaagcgataaaacggcaattttttccaccaggtggacgtcattggccgtacatacggtttacgtttagtcgtcatgttgcactccttagcgtggtttcagggtcgcgataagaaagtctttgctactttctactttgccctgctgaatggccgcagccggatcgacgtgtttcgggcagacttcggagcagtagcccacgaaagtacagctccatacgccgttctggctgttcaactgcgccatacgctccttcttaccgtggtcgcggctatcttcgttataacgatgcgccagcgtaatggcagccggaccgatgaactctgggttcaggccaaactgcgggcacgcggcgtagcacaaaccacagttgatgcaaccggagaactggtgatacttcgccatctgcgccggggtctggatgttagtaccctgatccgcggtgcgggagttgccgatgatgtacggtttgatcgcttccagactttcgatgaagtgggtcatatcgaccaccagatcgcgttcaatcgggaagttagctaacgcttcaaccttcataccgtcggtgtaatcacgcaggaaggttttacatgccagttttggcacgttgttaaccatcatgccgcaggaaccacaaatcgccatacggcaggaccagcggtagctcaggtccggtgccaggttgtctttgatgtagcccagcgcatccagtaaactggtagttgcgtcataaggcacttcatagaatgcgctatgcggtgcggtatcgacttccgggttatagcgcaccacctcaattttcaggtttttcatctcagccattcgccttctccttcttattggctgcttccgccttatcggctgcatccgcttcgccaccgtaaacgcgtttagctggcggcagcgtagtaatcttcacgtcgctgtactccaggcgagtcgtgccatcagcatcgcggaaggcgagggtgtgtttgaggaagttgacgtcgtcacgctcggtgcaaccttcgtccagacgctggtgcgcgccgcgggactctttacgtgccattgcggagtgcgccatacattcagcaacgttcagaccgtggcccagttcaatggtgtagagcaggtcggtgttgaacacgctggaagtgtcggtgatgcgcacgcgcttgaagcgttcctgcagctctgccagcttgtcgatggttttctgcatcagttccggcgtacggtagataccgcagccttcttccatagccaggcccatttcgtcgcggatcttcgcccagttttcgccgccatcctggttaaccagatctttcagacgttgttcaacgccagctgcctgcgcttcaattgccgcttcgttgccattaccggcagttgctgcacgctctgtcgcttgttcaccggccagacggccgaagaccaccagttccgccagggagttagaacccagacggtttgcaccgtgcagaccaacagaggaacattcacccacggcgaacagacctttaatgcgggtttcacagttctgatcggtttcgataccgcccatggtgtagtgtgcggtcggacgtaccggaatcggttctttaaccggatcgacgccaacgtacgctttcgccagttcgcagatgaacggcagacgttcatgcagttttttctcgccgaggtgacgcaagtcgagataaaccacatcgccacgcggcgtggagatggtgttgcctttacgccattcgtgccagaaggcctgagagactttgtcgcgtggacccagttccatatatttgtttttcggctcgcccagcggagtttccgggcccatgccgtaatcttgcagataacggtagccatttttgttgaccagaataccgccttcaccgcggcaaccttcggtcatcaggataccggaacctggcagaccggttgggtgatactgaacgaattccatgtcacgcagcggaacgccgtggcttagcgccatacccataccgtcaccggtaacgatgccgccgttggtgttgtaacgataaacgcgacccgcaccgccagtagccataacgaccgcgttagcacggatctgcaccagcgtgccttccatcatgttcattgctaccaggccgcgaacatgaccatcatcaaccagaatatccagcacgaaatgttcgtcaaaacgctggatctgcgggaattgcagagaggtctggaacagcgtgtgcagcatatggaagccggtcttatcggcggcgaaccaggtgcgctcgattttcatgccgccgaagcgacgtacgttgacgctaccatccgggcgacggctccatgggcatccccacagttccagttgggtcatttcggttgggcagtggtggacgaaataatccacgacatcctgctcacacaaccagtcgccacccgctactgtatcgtgaaagtgatattcgaagctgtcatgatcctgcgcgacagcggcggagcccccttctgcagcaacggtatggctacgcatcgggtatactttactgattagtgcgatttttgcattcggatttgcctgcgcggcagcaattgcagcacgtaatcccgcgccaccggcgcctacaatggcaagatcggcttgaaaggtttgcacgacattcctccagattgtttttatcccacagccacgtacttcagggtaagtacctgaaagttacggtctgcgaacgctattccactgctcctttataggtacaacagtatagtctgatggataagtctgaaatttgacgagatcgatttttttagtgcgcaagagggctaaattatcactgaagatgattaatttaattactaaaccatcagatcgtgctttttttagtcactgcccaccgctgtttgattcctgcgtaaaatttgtctcgccgtcgcgttgcgagtagacttcgtgcccttgtcaaaaactggagatttaactatgagcgaaacggcatcctggcagccgagcgcatccattcctaacttattaaaacgcgcggcgattatggcggagatccgtcgtttctttgccgatcgtggagtgctggaggtggagacgccttgtatgagccaggcgacggtaaccgatattcatttggtcccgtttgagacacgtttcgttggccccgggcatagccaggggatgaatctctggttaatgaccagcccggaataccatatgaaacgcctgctggttgccggttgtgggccggtattccagctgtgccgcagcttccgtaatgaagagatggggcgttatcacaaccctgagttcactatgctggagtggtatcgaccgcactatgatatgtaccggttgatgaacgaggtggacgatctcttacaacaggtgctggactgcccggcagcagaaagcctttcttatcaacaagctttcttgcgttatctggaaattgacccgctctctgccgacaaaacgcaactgcgggaagtcgcagcgaaactggatttgagcaatgttgctgataccgaagaagaccgcgacacgctgctacaattgctgtttacctttggcgtagagccaaatattggcaaagaaaaaccgacctttgtgtaccactttccagccagccaggcaagtctggcgcaaatcagtaccgaagatcatcgggtcgctgaacgctttgaggtttattataaaggtattgagctggcgaatggtttccatgaattgacggatgcccgtgagcagcaacaacgctttgaacaagataaccgtaagcgcgcggcgcgcggtttgccgcagcaccccattgaccagaatctgattgaagccttgaaagtcggtatgcctgactgttccggcgtggcattaggtgttgatcgtctggtgatgttggcgctgggcgcggagacactggctgaagtcatcgcctttagcgttgaccgggcataattctgaaaaattactgaattaacagcgaagaatggcgtgataagcgccattctgtagcatatgttttcatttttccgttaaaggccacaatttaagactggatatttgatatcatccaggtatcaattctgtattggtttttacgctgcctgctcaatgttgcgcagtgcagttcagtgggcacgtgttatacacgcgctgaaatgaaggatggtttcatgcctcacacgataaaaaagatgagtctgataggactcatattgatgatctttacttccgtatttggatttgccaatagcccaagcgcttattacttaatgggttatagtgcgattcccttttatatattttctgcattgttattctttattccattcgccttaatgatggctgaaatgggagctgcttatcgcaaagaagaaggcggtatctattcctggatgaataatagtgtcggaccacgttttgccttcattggtacgtttatgtggttttcctcttatatcatctggatggtgagtacctccgcgaaagtttgggtaccgttcagtacattcctctatggtagcgacatgacccagcactggcgtattgccggactggagcctacgcaggtggttggtctgctggctgtggcatggatgattctggtcaccgtcgttgcttctaaggggattaataaaattgcccgcattactgcggtgggcggtattgcagtaatgtgtctgaatttagtattgctgttagtaagcattactattttgttattaaatggtgggcatttcgcgcaggatattaatttccttgcaagtccgaacccgggttatcagtccggtctggcaatgctaagctttgtggtatttgccatttttgcctatggcggaattgaagcggttggtggtctggtcgataaaacggaaaatccagaaaagaactttgccaaaggtattgtttttgccgctattgttattagtatcggttatagcctggcaatatttttatggggcgtcagcacaaactggcagcaggtattaagtaatggttccgttaacctcggcaatattacctatgtgctgatgaagagccttgggatgacgctgggtaatgcactgcatttgagtcctgaagcgagtttgagcctgggcgtatggtttgcgcgtattactggacttagcatgttcctcgcctataccggtgcgttctttacgctttgctatagtccgttgaaagccatcatccaggggacgccgaaagcattgtggccggaaccgatgacgcgcctgaatgcgatggggatgccgtctatcgccatgtggatgcagtgcgggttggttactgtcttcatcctgctggttagctttggtggcggtaccgcaagcgcgttctttaacaagctgacgctgatggcgaacgtgtctatgacgcttccttacctgttcctcgcgctggctttcccgttctttaaagcacgtcaggatctcgacagaccgtttgtgattttcaaaacgcatttgagcgcaatgattgcgacagtggttgtcgtactggtggtgacatttgcgaacgtcttcaccatcattcaacctgtggttgaagccggagactgggacagcacattgtggatgattggcggccctgtcttcttcagcctgttagcgatggcgatttaccagaactattgcagcagagtggcaaaaaatccgcagtgggcggtggaataacccgatgccctatcgtctacctgacgatagggcgtaaagacaggaaatgttatggatgacaccagccgggacccggcaataaccgaagatgaaatcagggcgctgcaattttctgccggggatgtagcggaaatagagcagacgattctctcttttgtcgatgcctgccacacccgtaaagtggcgatggtggtgggtagcaccattaacaccctcaaagatcgcgatggtaaacggtggggaaacctgccggatatttattgcgcttatcttatccgatgtctggtttttcgcggggaattagtgggatacggcgatttgtttcgtatgcgctatagcgaaattaagcgaccggttaccttatgagtgcgcgcatgtttgtcttatgctgcatctggtttattgtggcgttcctctggataaccatcacttccgcgctggacaaagagtggatgattgatggacgcgggattaacaacgtctgcgatgtgttgatgtatctcgaagaagacgatacccgtgatgttggtgtgataatgacgttaccgctctttttcccttttctctggttcgctttgtggcgaaaaaaacgcggctggtttatgtacgccaccgcgctggctattttcggctactggctgtggcagttttttctgcgctatcagttttgtttgtgagccggattggttcatccggcacacaaacttacaaacttcccgcctgacgacctttgcccgcagacgtcagcgttctccccgtttgtttaccgttgaggctttccagacgcatctggaagggcgggaatggcatatcgataccgtgggcatggaagccagccagaatcagctggtggatctcatggcgtagcggcatacggtgacccatctcagcggcgtaaatacgcagctcgaaaatctgaatcccctgttgcagatccaccaggaagacttccggtgccgggttgtcgatcaccaggctgcagcgacgcgctgcggtgagcaggatttccgtcacttcttcgctattggcatcggcaggggccggtatcgtcaacaccacgcgcgtgacgctgtcagagaggctccagttgataaactgctcggtaataaacgccttgttcggcacgattatctctttacggtcccagtcgctgatggtggtggcgcgggtgttaattttcgtcacgctaccggtgagatcgcgaattgtcaccgtatcgccaatgcgaatcggtttttcgaacaggataatcagaccagagataaagttggcgaaaatttcctgcaaaccaaaaccgagaccaacaccgagcgcggcaaccagccactgcaatttgctccactcaataccaatcatactgaagccgaccagcccgccaatcagcatcagcagatatttggtgatggtggtgatggcgtaacccgtacccggcgttaaatccaggtgctgcaaaatcgccagttccagcagcgcgggcaagttgcgcaccagctgcgtggtgatgataaacaccagaatggcaatcagcaccgcaccgagggtaattggctccagactttctacgccctgtaccgtggaggtgacatcccacaggctaatattttcgaggaagccgaaagcggaatggatttcactccacagcacaatgacagaaagcagggcgatcaacatcaaaatactgcgcaccagccgcaaggattgcgcactgatggcatcgagatcgacttcgctttcatcgacttcaattgctccttccgggctactgtgatgatgcgcttcctcttcgccacgcgcacgttgcgctaacatctctgcccggcgatgcttcgcccgatcaaacgccagcctgcggcgctggatcagcatccagcggcggataacgtgataaaccaccagtagcaggaaccagatggcaacgctggtttcaagcctcgctaacagcgcctgtgccgttgccagataacccaccgcgctcgccagaatggcaaccaacggcgcgccaatcatcatgttccacagcatatggttggtaatgttgtcgccgctgccctctttgttgagatacagcggaatcccggcctttttcaggctgagggtgaccaccgccagcgcaccgcaaatgaggataaagcaaagccgtcccaggctaccggagaattcacggtcgtcgaggttatcgaacatcatcagcgccataatcagcggcacaataagcccgatgctcatcaggtagtagcgcatcccacgggaaacacgttcgcgcggccagccaaaatgagcgataaacaagccgttcgggcgggcaaaggtggcgcaaatcatcactacccacagcagcggcacggtggccgttacaccatcgccaatcgcgaccgccagcggataaggccacgcctcgcgcaagccgtaacccagcgtcatccacagcaccggtaacggactcgcgacgagaatgctccagaaaagagtgcgcaacgtcagccagaagtgatcctgagtcactttgccaactttcgccgcgctacgttcaagaaaacgggtgaaatagcggcggctgtaaatactgcaaccgaccagaatcaacgcgccaaacagcggcaaaattgtctctttgctggtcagcatcatcacactggctttgcccaactgactgaaggtgtccaggctaatgagacgacgcagatcctgggcgatttccagcggccaggcgatggtcatcgggcgcacgtcagaggtccagaacagatagcggtgcgttgcttcgttcacctctttcagcgcatcctccagttgcccgttggagactttcagcttggtcagttccaatagtagcgtgtcgccaccctgcaacaaactgttcagcaactcacgctgagtgcgcagttgtgcttccagaatacggttttgctcggcagtcagcggctgaccgtcggcctgatgaatttgccgtagcagcggctgtttattaagcagatcctcataacgtaaccgttgcacacgcaactgcgccatttcggtatcaagctgttgtggtttcggcatttccggcagccgtgccacctgcgcccgcagcgcttcgccgagcagattggagcttcccagccattggctctgttcacgcagcgtattcaacgcctgccggacctgtaacgtctggctggcagcctgacgctgttggctggcaacgagatccatccgctgcgcctgttgattcaaagccgcgcttagttcgcggttaattttgaattgcgcgacgatatctttcggcaaatcggcgctgttttctgccagcaattcggtactttccagcgcccgctccgcctcaagctgacgttggctgtttaattgattacgcaaggcctgcaaatacgcatccagttgctggctctctttttccgccagctcactgcgtaagcgcgctaattcctggcggttattggcagacagctgcgccagctccagttcatcaacgagcgccttaagacgtgcagagtcagactgcaacgcgaaattttgtgcctgattgagcggagtattgccggtaagcgttcccaggcggcgctcgatctcatttaactgacggcgggcgtcggtttgctgttgcggcagttgattcaggctatcggcaatctcgcgggcgcgctcctgctcttgctgggcctgacggcttttatccagcaactggctgctgacctggagaatttcctgattcagcgcgtcggtagacattcccgggctcacgctgcgcggctcgtcacgcatgttgtttaattgtgcgcgcagagtagcggagagtttcggataattatcgataacttgctgatattgtttgatgcgctcaagggaaccttttcgttcctcaagcgcatttaaggcagactggagcgcctctacgacttccggctgtgcgggtttcgccgcttttgcctgctccagttcctgagtgatttgtttgctatcgggggccgtcgcggcgtacgccccccaactgaggcaccaggccatcagaaaagtgataatcaggcgcacgtcagcgtttcctttgatggattagacctggtcttttttgtcgtcaaccaatgggctggcgtcgtgttctgcttcgatctcttcagcaggaagcggggcaggttcagcgtctggcgtaacaaaggtttcggtagatactgccagcggctggccaattttcgtgacagacaggctttccagttgctcaaccagattcactttacccggtgcaaacaggttgataacggtggaaccgagtttaaagcgacccatttcctggcctttcagcagtgccacagaaccgtcgttttccccggcaggccaggtccagcgcttgatgataccttcgcgcggcggcgtaatggtgcccgcccagaccgtctcaatgctgccaacaatcgtcgctccgaccagaatctgcgccattgggccaaattcggtatcgaaaaggcaaatcacgcgttcgttacgggcaaacagattcggcacgttctgagccgtgagatggttaacggagaagagatcgcccggcacgtagatcatctcacgcagaataccgttgcacggcatgtgtacgcggtggtagtcacgcggggagaggtaagtggtcacaaacgtaccgttgcggaacaggtccgccatcagatagttgcctgccagcagggcttcgaggctgtagttgtggcctttggcttgcaggattttatcttcttcgattttacccaactggctgataacgccatcggcaggcatgaccagtacattcggatcggtatcgattgggcgtacttcgtcacgcagcggacggacaaagaattcgttaaaggtgcggtagctggcggtgtccggcttttgcgcctctttcatgtcgaccttgtagtatttaacgaacagatcgataaccagttttgtcagccatcctgcccgcttgcttgcgccccaacccgccaggcgagtaagccatagtttcggcagaatgtactgtaggctaagtttaaaactatttaacaaggtagcctccaggccattgttttgtcgttcctgatccggcctacatgccggatcctgaaaaaaaggggacgattctaacgacggttagcttaattgtcagtcatccgtatcagaaaagtttttacgcgtttttacctgcgccatgctttccagaatacggtgatagttttcgaaacgggtttccgcgattttcccttcctcaaccgcttcccggatagcgcagcccggatcggtatcgtgtttgcaatcgcgatatttacacagacctaaatagtcatggaattcgacaaagccctgagtgatttgttccggctccaggtgccagaggccgaactcacgcactcctggggagtcaatcacatcaccgccgtgcgggaagtgatacagccgagcggcggtcgtggtgtgctgaccgagcccgctgttgtcagagatatcgttggtcaggatctctttttgcagccccagcaacgcattcagcaggctggatttgccgacgccagactgcccggcaaaaatgctgatgcgcccggtcaacgcctcttccagcggttttagcccatcctgagtatggctggaaaccatcaatacgcgataaccgatattgcggtagatatccatctgctcgttgacgaacgccatgccttcgtcgtccagcaggtctatcttgttgagcacaataatcggctcaatctgcaaggtttcgcaggccaccaggtaacggtcgataatattgaggctcagctccggcaaaatggcggagacaatgacaatctggtcgatgttggcggcaataggttttacgccgtcgtagaaatccggacgcgtcaacacgctggtacgctcatgcaccgcttccacgatccctttgacatttacgccttccgccgccggtttacccggacgccagactacgcggtcgccggttaccaggctacggatggtacggcgaatattgcagcggtgaacgtcgccatcggcggattccacatcagcgtgcataccaaagcggctgatgacgataccttcatcaggctcgccaaacagattgtcgtcgtagtcgggcttctccttagacgttttaagacgacgctggtgattggcgttcacgcggcgctgctggcctttggagagtttatttttactcaatcgtacagactcctggtcgcccctgatgggcaaaacatctatgatacacgcaattgtggatcaatatagtcactgtgaatgggtggaaaatagcatgagtgccaatgaaaacaacctgatttggatcgatcttgagatgaccggtctggatcccgagcgcgatcgcattattgagattgccacgctggtgaccgatgccaacctgaatattctggcagaagggccgaccattgcagtacaccagtctgatgaacagctggcgctgatggatgactggaacgtgcgcacccataccgccagcgggctggtagagcgcgtgaaagcgagcacgatgggcgatcgggaagctgaactggcaacgctcgaatttttaaaacagtgggtgcctgcgggaaaaagcccgatttgcggtaacagcatcggtcaggaccgtcgtttcctgtttaaatacatgccggagctggaagcctacttccactaccgttatctcgatgtcagcaccctgaaagagctggcgcgccgctggaagccggaaattctggatggttttaccaagcaggggacgcatcaggcgatggatgatatccgtgaaagcgtggcggagctggcttactaccgcgagcattttatcaagctgtaaaatttttcctggtcacgtaagcgccggaatccacttgcggcggcgtgattttgacgctaaattgaacgtcttgctgataatttcagcacttgagataaaaacgcaaaaaaaacttttttggggggttgcagagggaaagatttctcgtataatgcgcctcccgtaacgacgcagaaatgcgaaaattacgaaagcaaaattaagtagtacgcgggaatagctcagttggtagagcacgaccttgccaaggtcggggtcgcgagttcgagtctcgtttcccgctccaaaatttgaaaagtgctgcaaagcacagaccacccaagcgggaatagctcagttggtagagcacgaccttgccaaggtcggggtcgcgagttcgagtctcgtttcccgctccaaaatttgaaagtgctgtaaggcacagaccacccaagcgggaatagctcagttggtagagcacgaccttgccaaggtcggggtcgcgagttcgagtctcgtttcccgctccaaattcttctctcaataaaatatccacagcgacgcgatgcgttattgctggtttttgttgtctctgacaaactcttgtaaacagagttatccacagcctcaggctgtaatcttaatttcaaagaaacttcgcacggtgaatagtatttttttaacctattgatagataagttaaaaattaagattccgttttgtcgagtcgatcacttgacgattttattcgtcttgaattgcaatgcgtttttatttttattcacaagctgtggatgaatcaggcgtcacgcggtaaccctttttcaatcacccgaaccagacgctgttttttcggcaattgcacttcgactatgcacgcatttcgtctctctatttgctgcgcaatcgcccacgctatgtgctcatcgagaagtgggtgctcacctttacgactttccagcgctgtcaaaatcgtttcatcccaaggggcattgcctaatgctacggcgatattacgcagccaacgcaggtgaccaatacgacgaatcgcgcttccttccgtgacttttaaaaacttctcttcgctccaggcgaataactcaatgagttccggtgcgtgtagcggcttacgcgggctgaaatcctcttctgtggtgagttgactatagcgattccacgggcagataagctggcagtcatcgcaaccgtaaatacggtttcccattaacggtcgcaactcttccgggatcgccccttcaagttcgatggtgagataagagatacagcggcgagcatcgacggtatatggctcgacgatggcaccggtcgggcaaatcgtcatacaggccacgcatttgccgcatccttcctcgactggttgatccacgggcagcggaatatcgaccagcaattcgcctaaaaagaagaagctaccggcctcgcgattgaggataagactgtgcttacctgtccagccgagcccagctttttcagctaacgggcgctcgagaataggcgcagaatcgacaaacggtctaaaattcaggctaacacaatgttgctgaatcatctcgcccagctttttgagtcggttgcgcagaagtttgtgatagtcacggcccagcgcataacggctaacatagccgagtttggggtttttcagcgtgctggcaaatgcggcgttagcaggaaggtaattcatccgcacgctgatcacgcgcagcgtaccgggcaataactcatgagggcgagcgcgcagcataccgtgacgtgccatccagtccatttcgccgtggtattgtttgtccagccatgcttgcagtttgggctcggactcgctgagatcggtatcggtaatacctacctgctgaaagcccagttccagcccccactgtttaattttttgcgctaactgattgagatcgaggggctcactcatgacggaccatacaatgaagaaaaaccccgtaagtataccacacaccgtctggtacgccgacgatatccgccgcggagaacgcgaggcggcagatgtgctggggctcacactctatgagctgatgcttcgcgctggcgaggccgcattccaggtgtgtcgtagcgcgtatcctgacgcccgccactggctggtgctgtgcggtcatggtaataacggcggcgatggctacgtggtcgcgcgactggccaaagcggtcggcattgaggtcacgttgttggcccaggagagcgacaaaccgttgccggaagaggccgcgctggcacgcgaagcatggttaaacgcgggtggcgagatccatgctagcaatattgtctggcccgaaagcgtagatctgattgttgatgcgctgctcggtaccggtttgcggcaagcgccccgcgaatccattagccagttaatcgaccacgctaattcccatcctgcgccgattgtggcggttgatatcccttccggcctgctggctgaaactggcgctacgccaggcgcggtgatcaacgccgatcacaccatcacttttattgcgctgaaaccaggcttgctcactggaaaagcgcgggatgttaccggacaactgcattttgacagtctggggctggatagttggctggcaggtcaggagacgaaaattcagcggtttagtgcagaacaactttctcactggctaaaaccgcgtcgcccgactagccataaaggcgatcacgggcggctggtaattatcggtggcgatcacggcacggcgggggctattcgtatgacgggggaagcggcgctgcgtgctggtgctggtttagtccgagtactgacccgcagtgaaaacattgcgccgctgctgactgcacgaccggaattgatggtgcatgaactgacgatggactctcttaccgaaagcctggaatgggccgatgtggtggtgattggtcccggtctgggccagcaagagtgggggaaaaaagcactgcaaaaagttgagaattttcgcaaaccgatgttgtgggatgccgatgcattgaacctgctggcaatcaatcccgataagcgtcacaatcgcgtgatcacgccgcatcctggcgaggccgcacggttgttaggctgttccgtcgctgaaattgaaagtgaccgcttacattgcgccaaacgtctggtacaacgttatggcggcgtagcggtgctgaaaggtgccggaaccgtggtcgccgcccatcctgacgctttaggcattattgatgccggaaatgcaggcatggcgagcggcggcatgggcgatgtgctctctggtattattggcgcattgcttgggcaaaaactgagcccgtatgatgcagcctgtgcaggctgtgtcgcgcacggtgcggcagctgacgtactggcggcgcgttttggaacgcgcgggatgctggcaaccgatctcttttccacgctacagcgtattgttaacccggaagtgactgataaaaaccatgatgaaagcagtaattccgctccctgaataaggaagtgactgataaaaaccatgatgaatcgagtaattccgctccctgatgagcaggcaacattagacctgggcgagcgggtagcgaaagcctgcgatggcgcaaccgtaatctatctgtatggcgatttaggcgcaggtaaaaccacctttagccggggctttttacaggctctgggtcatcagggtaatgtcaaaagccccacttatacgctggtcgaaccctatacgctcgacaacttaatggtctatcactttgatttgtaccgccttgccgatcccgaggagctggagtttatggggatccgcgattattttgccaacgatgccatctgcctggtggagtggccacaacaaggtacaggtgttcttcctgacccggatgtcgaaatacacattgattatcaggcacaaggccgtgaggcgcgcgtgagtgcggtttcctctgcgggtgaattgttgctggcgcgtttagccggttaacctttgaaaggtggcgggatgatgtatcgcatcagaaattggttggtagcgacgctgctgctgctgtgcacgccggtgggtgccgcgacgctctctgatattcaggtttctaacggtaatcaacaggcgcggataacgttgagttttattggcgatcctgattatgcgtttagccatcaaagcaaacgcaccgtggcgctcgatatcaaacaaacgggcgtgattcagggactgccgttgttgttcagcggcaataatctggtgaaggcgattcgctctggaacgcctaaagatgcacaaacgctacggctggtggtcgatcttaccgaaaacggtaaaaccgaagcggtgaagcggcagaatggcagcaattacactgtcgtctttacgattaacgccgatgtgccgccaccgcctcctccgccgcccgtggttgcgaaacgcgttgaaacgcctgcggttgtcgcaccgcgcgtcagcgaaccggcgcgcaatccgtttaaaacggaaagtaaccgcactacgggtgttatcagcagtaatacggtaacgcgtccggcagcgcgcgcgacggctaacactggcgataaaattatcatcgctattgatgccggacacggcggtcaggaccctggcgctatcggccccggtggtacgcgggagaaaaatgtcaccatcgccatcgcgcgtaaattgcgtactttgctcaatgacgatccgatgtttaaaggcgttttaacccgtgacggggattactttatcagcgtgatggggcgcagtgatgtggcacgtaagcaaaacgccaatttcctcgtgagcattcacgctgatgccgcaccgaaccgcagtgcgactggcgcttccgtatgggtgctctctaaccgtcgcgccaacagtgaaatggccagctggctggagcagcacgagaaacagagcgagctgctgggtggggcgggtgatgtgctggcgaacagtcagtctgacccctatttaagccaggcggtgctggatttacagttcggtcattcccagcgggtagggtatgatgtagcgaccagtatgatcagtcagttgcaacgcattggcgaaatacataaacgtcgaccagaacacgccagccttggcgttctgcgcagcccggatatcccaagtgtactggtcgaaaccggttttatcagcaacaacagcgaagaacgtttgctggcgagcgacgattaccaacaacagctggcagaagccatttacaaaggcctgcgcaattacttccttgcgcatccgatgcaatctgcgccgcagggtgcaacggcacaaactgccagtacggtgacgacgccagatcgcacgctgccaaactaaggacgattgatgccaattcaggtcttaccgccacaactggcgaaccagattgccgcaggtgaggtggtcgagcgacctgcgagcgtagtcaaagaactagtggaaaacagcctcgatgcaggtgcgacgcgtatcgatattgatatcgaacgcggtggggcgaaacttatccgcattcgtgataacggctgcggtatcaaaaaagatgagctggcgctggcgctggctcgtcatgccaccagtaaaatcgcctctctggacgatctcgaagccattatcagcctgggctttcgcggtgaggcgctggcgagtatcagtagcgtttcccgcctgacgctcactagtcgcaccgcagaacagcaggaagcctggcaggcctatgccgaagggcgcgatatgaacgtgacggtaaaaccggcggcgcatcctgtggggacgacgctggaggtgctggatctgttctacaacaccccggcgcggcgcaaattcctgcgcaccgagaaaaccgaatttaaccacattgatgagatcatccgccgcattgcgctggcgcgtttcgacgtcacgatcaacctgagccataacggtaaaattgtgcgtcagtaccgcgcagtgccggaaggcgggcaaaaagaacggcgcttaggcgcgatttgcggcaccgcttttcttgaacaagcgctggcgattgaatggcaacacggcgatctcacgctacgcggctgggtggccgatccaaatcacaccacgcccgcactggcagaaattcagtattgctacgtgaacggtcgcatgatgcgcgatcgcctgatcaatcacgcgatccgccaggcctgcgaagacaaactgggggccgatcagcaaccggcatttgtgttgtatctggagatcgacccacatcaggtggacgtcaacgtgcaccccgccaaacacgaagtgcgtttccatcagagccgtctggtgcatgattttatctatcagggcgtgctgagcgtgctacaacagcaactggaaacgccgctaccgctggacgatgaaccccaacctgcaccgcgttccattccggaaaaccgcgtggcggcggggcgcaatcactttgcagaaccggcagctcgtgagccggtagctccgcgctacactcctgcgccagcaagtggcagtcgtccggctgccccctggccgaatgcgcagccaggctaccagaaacagcaaggtgaagtgtatcgccagcttttgcaaacgcccgcgccgatgcaaaaattaaaagcgccggaaccgcaggaacctgcacttgcggcgaacagtcagagttttggtcgggtactgactatcgtccattccgactgtgcgttgctggagcgcgacggcaacattagtcttttatccttgccagtggcagaacgttggctgcgtcaggcacaattgacgccgggtgaagcgcccgtttgcgcccagccgctgctgattccgttgcggctaaaagtttctgccgaagaaaaaagcgcattagaaaaagcgcagtctgccctggcggaattgggtattgatttccagagtgatgcacagcatgtgaccatcagggcagtgcctttacccttacgccaacaaaatttacaaatcttgattcctgaactgataggctacctggcgaagcagtccgtattcgaacctggcaatattgcgcagtggattgcacgaaatctgatgagcgaacatgcgcagtggagtatggcacaggccataaccctgctggcggacgtggaacggttatgtccgcaacttgtgaaaacgccgccgggtggtctgttacaatctgttgatttacatccggcgataaaagccctgaaagatgagtgatatcagtaaggcgagcctgcctaaggcgatttttttgatggggccgacggcctccggtaaaacggcgttagccattgagctgcgtaaaattttaccagtagagttgataagcgttgattctgcccttatttacaaagggatggatatcgggacggcgaagccgaacgctgaagagttactcgccgcgccgcaccgattgctggatattcgcgatccgagccaggcttacagcgctgctgattttcgccgcgatgcgctggcggaaatggccgatatcaccgcggcggggcggatcccactgttagtgggcggtacgatgttgtatttcaaggcattgctggaagggttgagcccgctaccgagcgcagacccggaagtacgggccagaattgagcaacaggcggcagagcaaggttgggagagtttgcatcgtcaacttcaggaggtagatccggttgcggcagcaaggattcatccaaatgatccacaaaggctttcccgggcactggaagtttttttcattagcggtaaaactttaacggaactgacgcaaacgagtggagacgctctaccgtatcaggtgcatcagttcgccatcgccccggcgagccgtgaactgctccatcaacgcattgagcagcgttttcatcagatgttggctagtggttttgaagcagaagtccgggcgctttttgcccgaggagatttgcatacggacttgccttccattcgttgcgtgggttatcgccagatgtggtcttaccttgaaggcgaaatcagttacgatgaaatggtttatcgaggtgtttgcgccacgagacagttggcgaagcggcagataacctggctgcgtggttgggaaggggttcactggcttgacagtgaaaaaccagaacaggcgcgtgacgaagtattacaggttgttggtgctatcgcaggctgaatgtgtacaattgagacgtatcgtgcgcaattttttcagaatcgaaaggttcaaagtacaaataagcatataaggaaaagagagaatggctaaggggcaatctttacaagatccgttcctgaacgcactgcgtcgggaacgtgttccagtttctatttatttggtgaatggtattaagctgcaagggcaaatcgagtcttttgatcagttcgtgatcctgttgaaaaacacggtcagccagatggtttacaagcacgcgatttctactgttgtcccgtctcgcccggtttctcatcacagtaacaacgccggtggcggtaccagcagtaactaccatcatggtagcagcgcgcagaatacttccgcgcaacaggacagcgaagaaaccgaataaggtttcgggctgtttttttacacggggagccagcgatcctgcgttccccgctgatctatttagagggttatacgcttgtttgaccgttatgatgctggtgagcaggcggtactggtacacatctattttacgcaagacaaagatatggaagacctccaggagtttgaatctctggtctcttccgccggtgtcgaagcattgcaggtgattaccggtagccgtaaagcgccgcacccaaagtattttgtaggtgaaggtaaagcagttgaaattgcggaagctgtcaaagcgacgggtgctagcgtcgttctttttgaccatgccctgagcccggcgcaagagcgtaacctggagcgtttgtgcgagtgtcgtgttatcgaccgcaccggccttattttagatattttcgcccaacgtgcgcgtacccatgagggtaagttgcaggttgagctggcgcagctgcgccatctggctacgcgcctggtgcgtggctggacccaccttgaaagacagaaaggcgggataggtttgcgtggtccgggtgaaacccagctcgaaaccgaccgtcgtttgttgcgtaatcgcatcgtgcagatacagagccgcctggaaagagttgaaaagcagcgtgagcaggggcggcaaagccgtatcaaagccgacgttcctactgttagcctggtgggatataccaacgccggtaaatctacccttttcaatcgcatcaccgaagcgcgggtctacgcggcagaccagttgtttgccaccctcgacccgacgttgcggcgtattgacgttgcagatgtcggtgaaaccgtacttgcagataccgtagggtttattcgccacctgccgcacgatctggtggcggcatttaaagccacgttacaagagacgcggcaagccacattactgctgcacgtcattgatgcggcggatgtgcgtgtacaagaaaacatcgaagcggtgaatacggttcttgaagagatcgacgctcacgagatcccaaccctgctggtgatgaacaagatcgatatgctggaagatttcgaaccgcgtattgatcgggacgaagagaacaaaccgaaccgtgtctggctttccgcacagaccggagcggggataccacagctttttcaggctttgacggagcggctttccggcgaggtggcgcagcatacattgcgtctgccaccgcaggaagggcgtctgagaagtcgtttttatcagcttcaggcaatagaaaaagagtggatggaggaggacggcagcgtaagtctgcaagttcgtatgccgatcgttgactggcgtcgcctctgtaaacaagaaccggcgttgatcgattacctgatctaacggcgtagcgtctgaagcgtggagtcatatcctctggcgtcgaaagacaacagggatcaccgcataacaaatatggagcacaaacatggcgtggaatcagcccggtaataacggacaagaccgcgacccgtggggaagcagcaaacctggcggcaactctgagggaaatggaaacaaaggcggtcgcgatcaagggccacctgatttagatgatatcttccgcaaactgagcaaaaagctcggtggtctgggcggcggtaaaggcaccggatctggcggtggcagtagtagccaaggcccgcgcccgcagcttggcggtcgtgtcgttaccatcgcagcggcagcgattgtcattatctgggcggccagtggtttctataccattaaagaagccgaacgcggcgtggtaacacgctttggtaaattcagccatctggttgagccgggtctgaactggaaaccgacgtttatcgacgaagtcaaaccggtgaacgtggaagccgtgcgtgaactggccgcttctggtgtgatgctgacgagcgacgagaacgtagtgcgcgttgagatgaacgtgcagtaccgcgtcaccaatccggaaaaatatctgtatagcgtgaccagcccggatgacagcctgcgtcaggctaccgacagcgccctgcgtggagttatcggtaaatacaccatggaccgcattctgacggaaggtcgtaccgtgattcgtagcgatactcagcgcgaactggaagagacgattcgtccgtatgacatgggtatcacgctgctggacgtcaacttccaggctgctcgtccgccggaagaagtaaaagcggcgtttgacgatgcgattgccgcgcgtgaaaacgaacagcaatacattcgtgaagcagaagcgtataccaacgaagttcagccgcgtgcgaacggtcaggcgcaacgtatcctcgaagaggcgcgtgcgtacaaggcccagaccatcctggaagctcagggtgaagtggcgcgctttgctaaacttctgccggaatataaagccgcgccggaaattactcgcgagcgtctgtatatcgagacgatggaaaaagtgttgggtaacacccgcaaagtgctggttaacgataaaggtggcaacctgatggttctgccgttagaccagatgctgaaaggtggtaacgcccctgcggcgaagagcgataacggtgccagcaatctgctgcgtctgccgccagcctcttcctccacaaccagtggagcaagcaacacgagctccaccagtcagggcgatattatggaccaacgccgcgccaacgcgcagcgtaacgactaccagcgtcagggggaataacgatgcgtaagagtgttatcgcgattatcatcatcgtgctggtagtgctttacatgtctgtctttgtcgtcaaagaaggtgagcgcggtattacgctgcgttttggtaaggtactgcgtgacgatgacaacaaacctctggtttatgagccgggtctgcatttcaagataccgttcattgaaacggtgaaaatgctcgacgcacgtattcagaccatggacaaccaggccgaccgctttgtgaccaaagagaagaaagacctgatcgtcgactcttacatcaaatggcgcatcagcgatttcagccgttactacctggcaacgggtggtggcgacattagccaagcggaagtgctgttgaaacgtaagttctctgaccgtctgcgttctgaaattggtcgcctggacgtgaaagatatcgtcaccgattcccgtggtcgtctgaccctcgaagtacgtgacgcgctgaactccggttctgcgggtacagaagatgaagttactaccccggcggcagataacgccattgccgaagcggcagagcgcgtaacggctgagacgaagggcaaagttccggtcatcaacccgaacagtatggcggcgctgggtattgaagttgtcgatgtgcgtatcaagcagatcaacctgccgaccgaagtgtctgaagcgatctacaaccgtatgcgcgccgagcgtgaagcggtagcgcgtcgtcaccgtagtcaaggtcaggaagaagcggaaaaactgcgcgcgactgccgactatgaagtgaccagaacgctggcagaagctgagcgtcagggccgcatcatgcgtggtgaaggcgatgccgaagcagccaaactgtttgctgatgcattcagtaaagatccggacttctacgcattcatccgtagcctgcgtgcttatgagaacagcttctctggcaatcaggacgtgatggtcatgagcccggatagcgatttcttccgctacatgaagacgccgacttccgcaacgcgttaatataacgactgcggtacaggtcaataaagccaccgcatcctcagggatgtcggtggttttctttttctataaggataatgaatgaatagcacaatctggctggcgcttgccctggttttggtactggaaggtttagggccgatgctttacccgaaggcatggaagaagatgatctctgcgatgaccaatttgcccgataatattttacgtcgttttggcggtggacttgtggttgcgggcgttgtggtctactacatgttgaggaaaacgattggctgaacaaaaaacagactgatcgaggtcatttttgagtgcaaaaagtgctgtaactctgaaaaagcgatggtagaatccatttttaagcaaacggtgattttgaaaaatgggtaacaacgtcgtcgtactgggcacccaatggggtgacgaaggtaaaggtaagatcgtcgatcttctgactgaacgggctaaatatgttgtacgctaccagggcggtcacaacgcaggccatactctcgtaatcaacggtgaaaaaaccgttctccatcttattccaagtggtattctccgcgagaatgtaaccagcatcatcggtaacggtgttgtgctgtctccggccgcgctgatgaaagagatgaaagaactggaagaccgtggcatccccgttcgtgagcgtctgctgctgtctgaagcatgtccgctgatccttgattatcacgttgcgctggataacgcgcgtgagaaagcgcgtggcgcgaaagcgatcggcaccaccggtcgtggtatcgggcctgcttatgaagataaagtagcacgtcgcggtctgcgtgttggcgaccttttcgacaaagaaaccttcgctgaaaaactgaaagaagtgatggaatatcacaacttccagttggttaactactacaaagctgaagcggttgattaccagaaagttctggatgatacgatggctgttgccgacatcctgacttctatggtggttgacgtttctgacctgctcgaccaggcgcgtcagcgtggcgatttcgtcatgtttgaaggtgcgcagggtacgctgctggatatcgaccacggtacttatccgtacgtaacttcttccaacaccactgctggtggcgtggcgaccggttccggcctgggcccgcgttatgttgattacgttctgggtatcctcaaagcttactccactcgtgtaggtgcaggtccgttcccgaccgaactgtttgatgaaactggcgagttcctctgcaagcagggtaacgaattcggcgcaactacggggcgtcgtcgtcgtaccggctggctggacaccgttgccgttcgtcgtgcggtacagctgaactccctgtctggcttctgcctgactaaactggacgttctggatggcctgaaagaggttaaactctgcgtggcttaccgtatgccggatggtcgcgaagtgactaccactccgctggcagctgacgactggaaaggtgtagagccgatttacgaaaccatgccgggctggtctgaatccaccttcggcgtgaaagatcgtagcggcctgccgcaggcggcgctgaactatatcaagcgtattgaagagctgactggtgtgccgatcgatatcatctctaccggtccggatcgtactgaaaccatgattctgcgcgacccgttcgacgcgtaattctggtacgcctggcagatattttgcctgccgggcgaacagtgtgatacattgctgtgtcgggtaagccattacgctatccgacacagtgttaaatcctcgcttttttccttccccgaactgaaataaattagcgacacagcttgtggctggtttatcatcaatataaatgtattttttcccgatttcccttttgaggttgatgtgcagttaacgagtttcactgattacggattacgtgcgctgatctacatggcgagtttgccagaagggcggatgaccagtatttctgaagtgactgacgtctacggcgtctcccgtaatcatatggtcaaaataatcaatcaacttagtcgtgccggctacgtgactgctgttcgtggaaaaaatggcggcattcgcctgggtaaaccggcgagtgcgatacgtattggtgatgtggtgcgcgagctggagcccttaagcctggtgaattgcagcagtgagttttgccacattacacctgcctgtaggttgaaacaggcactttctaaggccgtgcaaagttttcttacggaactggataactacacgcttgccgatttggttgaagagaatcaaccgctttataaattattgctggtggagtgacgaaaatcttcatcagagatgacaacggaggaaccgagatgagtcaagatcctttccaggaacgcgaagctgaaaaatacgcgaatcccatccctagtcgggaatttatcctcgaacatttaaccaaacgtgaaaaaccggccagccgtgatgagctggcggtagaactgcacattgaaggcgaagagcagcttgaaggcctgcgtcgccgcctgcgcgcgatggagcgcgatggtcaactggtcttcactcgtcgtcagtgctatgcgctgccggaacgcctcgacctggtgaaaggtaccgttattggccaccgtgatggctacggctttctgcgggttgaagggcgtaaagatgatttgtatctctccagcgagcagatgaaaacctgcattcatggcgatcaggtgctggctcagccgctgggtgctgaccgtaaaggtcgtcgtgaagcgcgtattgtccgcgtactggtgccaaaaaccagccagattgttggtcgctactttaccgaagcgggcgtcggctttgtggttcctgacgacagccgtctgagcttcgatatcttaatcccgcccgatcagatcatgggcgcgcggatgggctttgtggtcgtagtcgaactgactcagcgtccgactcgccgcaccaaagcggtgggtaaaatcgtcgaagtgctgggcgacaatatgggcaccggcatggcggttgatatcgctctgcgtacccatgaaattccgtacatctggccgcaggctgttgagcaacaggttgccgggctgaaagaagaagtgccggaagaagcaaaagcgggccgtgttgatctgcgcgatttaccgctggtcaccattgatggcgaagacgcccgtgactttgacgatgcagtttactgcgagaaaaaacgcggcggcggctggcgtttatgggtcgcgattgccgacgtcagctactatgtgcgtccgagtacgccgctggacagagaagcgcgtaaccgtggcacgagcgtgtacttccctagccaggttatcccgatgctgccggaagtgctctctaacggcctgtgtagcctcaacccgcaggtagaccgcctgtgtatggtgtgcgagatgacggttagcagcaaaggccgcctgacgggctacaaattctacgaagcggtgatgagctctcacgcgcgtctgacctacaccaaagtctggcatattctgcagggcgatcaggatctgcgcgagcagtacgccccgctggttaagcatctcgaagagttgcataacctctataaagtgctggataaagcccgtgaagaacgcggtgggatcagttttgagagcgaagaagcgaagttcattttcaacgctgaacgccgtattgaacgtatcgaacagacccagcgtaacgacgcgcacaaattaattgaagagtgcatgattctggcgaatatcagcgcggcgcgtttcgttgagaaagcgaaagaaccggcactgttccgtattcacgacaagccgagcaccgaagcgattacctctttccgtagtgtgctggcggagctggggctggaactgccgggcggtaacaagccggaaccgcgtgactacgcggagctgctggagagcgttgccgatcgtcctgatgcagaaatgctgcaaaccatgctgctgcgcagcatgaaacaggcgatttacgatccagaaaaccgtggtcactttggcctggcattgcagtcctatgcgcactttactagcccgattcgtcgttatccagacctgacgctgcaccgcgccattaaatatctgctggcgaaagagcaggggcatcagggcaacaccactgaaaccggcggctaccattatagcatggaagagatgctgcaactgggtcagcactgtagcatggcggaacgtcgtgccgacgaagcaacgcgcgatgtggctgactggctgaagtgtgacttcatgctcgaccaggtaggtaacgtctttaaaggcgtaatttccagcgtcactggctttggcttcttcgtccgtctggacgacttgttcattgatggtctggtccatgtctctagcctggacaatgactactatcgctttgaccaggtagggcaacgcctgatgggggaatccagcggccagacttatcgcctgggcgatcgcgtggaagttcgcgtcgaagcggttaatatggacgagcgcaaaatcgactttagcctgatctccagcgaacgcgcaccgcgcaacgtcggtaaaacggcgcgcgagaaagcgaaaaaaggcgatgcaggtaaaaaaggcggcaagcgtcgtcaggtcggtaaaaaggtaaactttgagccagacagcgccttccgcggtgagaaaaaaacgaagccgaaagcggcgaagaaagacgcgagaaaagcgaaaaagccaagcgcgaaaacgcagaaaatagctgcagcgaccaaagcgaagcgtgcggcgaagaaaaaagtggcagagtgatcaataccctctttaaaagaagagggttagattgctgacaaaatgcgctttgttcatgccggatgcggcgtgaacgccttatccggcctacataatcacgcaaattcaatatattgcagagatcatgtaggccggataaacgtagtgcatcaggcaaaacgtaaacaacgagtacattaatgagcgaaatgatttacggcatccacgcagtgcaggccctgctggagcgcgcccctgaacgttttcaggaagtctttattttaaaaggccgtgaagataaacgtctgttaccgctgattcacgcccttgagtctcagggcgtggttatccagttggcaaaccgccaatatctcgacgagaaaagcgacggtgccgtgcatcagggcattatcgcccgcgtgaagccaggacgtcagtatcaggaaaacgatctgccggatctgatcgctagcctcgatcaaccgttcctgctgatcctcgacggcgtaaccgatccgcacaacctcggcgcgtgcctgcgtagtgcggacgccgcaggcgttcatgcggtgattgtgccgaaagatcgctccgcacagctcaacgctacggcgaaaaaagtagcctgcggcgcggcagaaagcgttccgctgattcgggtgactaaccttgcgcgcaccatgcgtatgttgcaggaagagaatatctggatcgtcggtacggcaggcgaggcggatcatacactctatcagagcaaaatgaccggacgcctggcgctggtgatgggtgcggaaggtgaaggtatgcgtcgcctgactcgtgaacattgcgatgagttgatcagcatcccgatggctggaagcgtttcttccctgaacgttagcgttgcgaccggaatttgcttatttgaagcggtgcgccagcgcagctaatttctcagaattatgaaaagccatccagatttggatggtttttttttgtctatagctggtaagataattacgtattgcaaatattcattttattaatatttaaacttaatctatatggaataatatatgacatggaatccgttggcgctagcgacggcgctgcaaactgtacctgaacaaaatattgatgtaacaaatagcgagaacgcattaattattaaaatgaatgattatggcgatttgcaaatcaatattctttttacttcccgccaaatgattatcgaaacctttatttgtccggtgagtagtatcagcaatccagatgaatttaataccttcttattaagaaatcagaagatgatgccgttgagtagcgtagggatctccagcgtacaacaggaagagtattacattgttttcggggcgttaagccttaaatcttctcttgaagatatcctgcttgagataaccagcctggtagataacgcattggatctggctgaaattacagaagaatatagtcactaattacaaggacgggtatttatgggaattttaaaaagtttatttacgctggggaaaagctttatctcccaggcggaagaatccattgaagaaacccagggcgtgcgcatgctggaacagcatattcgtgacgctaaagctgaactcgataaagccggaaaatctcgcgttgatctgctggcgcgggtgaaattaagtcacgataagctgaaagatttacgtgagcgcaaagccagtctggaagcccgtgcgctggaagcgttaagcaagaacgttaatccgagcttgattaacgaagttgctgaagaaatcgcgcgccttgagaatctcattaccgctgaagagcaagtgttgagcaatctggaagtctcccgtgatggcgtggaaaaagcagttacagcgacagcgcagcgtatcgctcagtttgagcagcaaatggaagtcgttaaagccactgaagccatgcagcgtgcacaacaggctgtaacaacctctaccgttggcgcatcttccagcgttagcacagcggcagaatccttaaaacgcctgcaaacgcgtcaggccgaacgtcaggctcgcctggatgctgccgcacagttggagaaagtcgcagacggtcgcgaccttgacgaaaagctggcggaagccggaattggcggtagcaataaaagtagcgcccaggatgtattagcaagactgcaacgccaacagggcgagtaatttttttgccagcctcgctaaaaggctggcaactattttaaggataaaatatgtctggttttttccagcgtctgtttggcaaggataataagccagctatcgctcgtggtccgctgggacttcatctcaatagtggctttacgctcgacacgttagcgtttcgtttgctggaagatgaattgctgattgcgctgccgggtgaggaatttacggtagccgccgtcagccacatcgatctgggcggcggtagtcagattttccgctactacactagtggcgatgagtttctgcaaatcaataccaccggcggcgaagatattgatgacattgatgatatcaagctctttgtctatgaagagagctacggtatcagtaaagagagtcactggcgcgaggcgatcaacgccaaagcgatgggagcaatgaccttaaactggcaggaaaaacgctggcagcgattttttaacagcgaagaaccgggaaatatcgaacccgtctacatgctggaaaaagtagaaaatcaaaaccatgccaaatgggaggtccataattttaccatgggctaccaacggcaagtaaccgaagatacttacgaatatttgctgctaaatggtgaggaatcttttaacgatctcggcgagccagagtggttatttagccgcgcgttgggtgtcgatatcccgctgacaagtcttcatattattggttaattacaaggacgtttacaatgcatatactggatagtcttcttgcctttagcgcctatttttttattggcgtggctatggtgattatttttctgtttatctattctaaaattacaccgcacaacgaatggcagttaatcaaaaacaataataccgcggcgagtctggcgttcagcggtacattgttgggttacgttatccccttatccagtgcggcaatcaatgcggtgagtattccagactatttcgcctggggcgggattgcactggtgattcagttactcgtttttgctggtgtcagactttatatgcccgcattaagcgaaaaaattattaatcacaataccgcagcaggaatgtttatgggaaccgccgcgctggctggcggtatttttaacgcagcttgtatgacatggtaatggacgatcatggccagaaaacgcaaaagtagaaataacagtaaaattggtcacggagcgattagtcgcattggtagaccgaataatccttttgaaccgtgccgcaatcgctacgcacaaaaatacttaacgttggcgctaatgggcggtgccgcttttttcgtattgaaaggttgtagcgatagtagcgatgtcgataacgacggcgacggaacgttttacgcgacagtgcaggattgtattgatgacggtaataatgccgacatttgcgcgcgtggctggaacaacgccaaaacggcattttatgccgatgttccgaagaatatgactcagcagaactgtcagtctaagtacgaaaattgctactacgacaatgttgaacagagttggatcccggtcgtttctggatttttgttaagccgggttattcgtaaagatcgcgatgagccgtttgtttataacagcggcggttcctcttttgctagccgcccagtctggcgcagcacttctggtgattactcctggcgctccggttctggcaaaaaagagtcttactctagcggcggctttaccaccaaaaaagcgtctaccgtttctcgcggcggctatggtcgttcttccagcgcccgtgggcattggggaggctaatcatgctgagacacaacgttcctgtgcgacgggatctggaccagatcgccgctgacaacggtttcgactttcatatcatcgacaatgaaatctattgggatgagagtcgggcttaccgttttactctgcgccagattgaagagcagatcgaaaaaccgactgcggaactgcatcagatgtgccttgaggtggtggatcgcgcggtaaaagatgaagagatcctgacgcaactggcgatcccgccgttgtactgggatgtgatcgctgaaagctggcgcgcccgcgatcctagcctgtatggacggatggattttgcctggtgtggcaatgcgccggtgaagctgctggagtacaacgccgatacgccaactagtttgtacgagagcgcttatttccagtggctgtggctggaggatgcccggcgcagcggcattattccgcgtgatgccgatcagtacaatgctattcaggaacgcctgattagtcgctttagcgagctttacagtcgggaaccgttttatttttgctgctgtcaggacaccgatgaagacaggagtaccgtgctgtacttgcaggactgcgcccagcaggcagggcaggagagccggtttatctacattgaagatctcggtttgggcgtcggcggcgtactgaccgatcttgatgataatgtcatccagcgtgcatttaagctgtatccgctggagtggatgatgcgtgacgataacggtccgctgctgcgcaagcgtcgcgagcaatgggtggagccgttatggaaaagtatcttgagtaataaagggctaatgccgctgctttggcgcttcttccctggtcatcctaatcttcttgcgtcctggttcgatggcgagaaaccgcagattgccgctggcgaaagctatgtgcgtaaaccaatctatagccgcgaaggcggcaacgtcaccatttttgacggcaagaataacgttgttgaccacgctgatggtgattacgccgatgaaccgatgatctaccaggcgtttcaacctctgccgcggtttggcgatagctacacactcatcggtagctggattgtcgatgatgaagcgtgcggaatggggatccgtgaagataacacactgatcaccaaagacaccagtcgtttcgttccgcattacattgctggataagaatgttttagcaatctctttctgtcatgaatccatggcagtgaccatactaatggtgactgccattgatggagggagacacagtgcactggcaaactcacaccgtttttaatcaacctataccattaaataacagcaacttatacctgtctgatggcgcgctctgcgaagcggtaacgcgtgaaggtgctggctgggatagcgattttctagccagtattggtcagcagttaggaacggctgaatcccttgaactggggcggctggcgaatgtgaatccgcctgaattattgcgctacgatgcgcaaggacgccgtctggacgatgtgcgttttcaccccgcctggcacctgctgatgcaggcgctatgtaccaatcgggtgcacaatcttgcctgggaagaagacgctcgctccggcgcatttgtggcgcgcgcggcgcgttttatgttacatgcgcaggttgaggcagggagcttatgtccgataaccatgacctttgccgccacgccattgttgttacagatgttacccgcgccgtttcaggactggaccacgccgctattgagcgatcgctacgattctcacttattgccaggtgggcaaaaacgcggtttgttgattggcatgggaatgacggaaaagcagggcggttccgatgttatgagcaacaccacccgtgcagagcgtctggaagatggctcttatcggctggtggggcataaatggtttttcagcgttccgcaaagcgatgcgcatctggtgctggcgcagaccgcgggtggtctgtcctgcttttttgtgccgcgctttttgcctgacgggcaacgcaacgcgattcgcctcgagcggctgaaagataagctgggtaatcgctctaacgccagttgcgaagtggagtttcaggatgccattggttggttgttggggctggaaggggaaggaattcgtctgatcctgaaaatgggtgggatgacgcgttttgattgcgccctgggtagccatgccatgatgcgccgtgcatttagcctggcgatttatcatgcacatcaacgccatgtttttggtaatccattgatccaacagccccttatgcgtcatgtcttaagtcgcatggcacttcagcttgaagggcaaacggcgttgctgtttcgtcttgcgcgagcgtgggaccggcgtgccgatgccaaagaagccctgtgggcgcgtttatttacgcctgcggcaaaatttgtgatctgcaaaagaggtatgccgtttgtggccgaagcgatggaggtgctgggcggcattggttattgcgaggagagtgagctgccgcggctttaccgggagatgccggtaaacagtatttgggaaggttccggcaatattatgtgcctggatgtgttgcgcgttctcaataagcaagcgggcgtatacgacttattgagcgaagcatttgtggaagtgaaagggcaggatcgctattttgatcgcgcggttcgtcgtttacagcagcagctgcgtaagccagctgaagaactggggcgagagattactcatcagctattcctgctgggctgcggtgcgcaaatgttgaaatatgcttctccgccaatggcgcaggcgtggtgtcaggtgatgttagatacgcgcggcggcgtacggttgagtgagcagatccagaatgatttattgctgcgggcgacggggggagtgtgtgtgtaagcgtatacgactgatgcgacgctggtttcgattaactaaatgaaatatgtgaaaattgtaggccggacaaggcgctcgcgccgcatccggcattgttcatttgctgtagatgacactcatgcatacagtatcgcctgtacgcgccagttatcaggctgctggtcttcgtacatggtaataatgcggtaccaactcgcaccttgttcatcggcctttaacgccacgatacgttccacgtcctgcggatccccactaatattgctaacactgatctgacctatttcattcaggcccgtcacgcagtcagcactggcgaattctgcagactgtgccgtggcgctcgcaggataagtcactaattgcaggctgggactggcaagtaattgtttcatcgtcagctccatttttcgtttccccacatgttgcagggcattccatcgcggtaataaacgcccaggcttccagccggtaatttattgtgcacaggtaaacgcatagggacgcaaagcaatgtaaagctgactatgtaagttgtctgatttatttacggtacaaaatggcttgactataccactgtcctgtcacgatggtttcgtccaccatgacgacaacgtaataatcagcttttgcagcgacagctttcgctttgatttctgctaatgcgtcatccggagaaccccgaaccatcgtgcttacgctacctattcgctgtaacccttgcgtctggtcgcggcgaatctcttgcggatggtccgttactggcggtgctggctgtggcgtaccttgcagtgcgctacaggcacttaacatcaacaccaataataaactggcaaaccggtaaataacgctattacgtttcctgctaaccatagtgtagtgccttattaatttaactttgggggaatgttcccgaattgttacctggtacgcgattttcgaatgaaaacgtgacgaaagcgtaacccacatctcaacattatgaactaataccgccagcagaaacttgtgctaaggatttcttcatgtcataccagacaaaaaggagagacagatgattgaaatagaaagtcgcgagctggcagatattcccgttcttcatgcttatcctgtcgggcaaaaagataccccgttaccgtgcgtaattttttatcacggctttactagttccagtctggtgtatagctattttgccgttgcgctggcgcaggctggtttgcgggtgatcatgccggatgcgcccgatcacggtagccgttttagtggtgacgcagcgcggcggttaaatcaattctggcaaatcttgctacaaagtatgcaggaattcactactttacgtgcggcaatagccgaagaaaactggctgcttgatgaccgtctggcagtcggtggcgcgagcatgggcgcgatgacggcactggggattaccgctcgccaccccacggtgagatgtaccgccagcatgatgggaagcggctattttacaagtctcgcccgtagtctgtttccaccgctgatacctgaaacggcagcacagcagaatgaattcaataacattgtcgcgccactggcagagtgggaagcgacaaaccacctggaacaacttagtgacagacctctactgctgtggcatggcctcgacgatgacgttgtgcctgccgacgaaagtctacgtttgcagcaggccttaagcgagacgggacgggataaactgctaacctgtagttggcagccaggcgtgcgtcaccgcattacgcctgaggcgttagatgctgccgtgacatttttccgccagcatctttaaacacgcagaatgctgaccccttgcgcttccagttgttgcaggatttccgggttagcatttttgccggtgataagcatatcgatttgatcggcacggctaaaaagcattcccgcgcgttcgccaatcttactgctatcaaccagtaccaccagtttccctaccacgctcagcatcttctgctctgccattgctgtcagcatatcggttttatacaacccttctgcggtcagcccttttccgctggtaaacatccagtgcccggcatagagactgttttcgctgccctgcgggcttaaagtgatggactgacttttgttgtactgtccgcccataatgatcacgctgtcatgttcttgatcgatcaggtaatttgccagcggtagataattagtgatgatttgcactggcttgccacacatttcccgcccaagcagaaacgcggtggagccgcagttgatgactacgctttcgcccggattaaccagctggctggccgctttagcgatacgtactttttcatcgtgattctgcgcctgatgcagattcatcggcgtccagcgcgggcgctgttgggtaatagcttctgcgccattgcgcacttttttcagtttgccgctttcgtcaagtttattgatatcgcgtcgcgcagtggcagggctaattcccagacgctcaacgactttctcaacggtcacaaagcccaattgtgcgagcatttccaggaggatttgatgtctttgtgcttcagtcatgagctattccgataaaatttgatttttttagatgatatttgaaatagccaggaaatactacgccggatagcgcgaacttctccacgctacccggtataaacgacagattacaggaaactcttgaacggcagatccggttcaatagtgaagcaatcatcgaaaccgcgcggatagtggtactcgaagttgtctttatccagcggccaggtaaatttgccacccacctgccagataaacggcttgaagccatacttcaggcgatcttttttcatctcccacagcacgcggatctcttgcggatcggcctggaagttactccagatatcgtggtggaacgggatcactactttcgcattcagcgcttcacccatacgcagcatatcggcgctggtcattttgtcggtgataccgcgcgggttttcgccgtagcttcctaacgccacgtcgatctgatgttcgttaccgtgcttcgcataatagttagagtagtgggagtcgccgctgtgatacagggagccgccaggcgttttgaacaggtagttcaccgcgcgatcgtccatgccatctggcagtacgccagccgctttttgatcggcaggcagggtgatcagtgcagtacggtcgaaagcatcaagcgcatgaatttcaatgtctttcacttttactacatcgcccggtttgaccacgatgcaacgctctttcggtacgccccagccaatccacaaatccacacaggttttcggtccgataaacggtacgtcatctgcacaattctgcatcacggcagcagcgacgttaacgtcgatatgatcgttgtgatcgtgagtcgccagtaccgcgtcgatctggcgaatcgcaaacggatcaagaacaaacggggtggtacgcaggtttggctgcagttttttcacgccagccatgcgctgcatctggtgaccctgtttcattaacgggttaccgtgactttgtttgccagtgccgcaccagaaatcaacgcaaacgttggtgccaccttcgcttttcaaccagatcccggtgcagccaagccaccacatcgcaaatgtgccaggagcgacctgttcttgttcaatttcttcattcaaccagctaccccactccgggaaagtgctcaggatccaggattcacgggtgatacttttcactttactcatcgccatttaccttcatgatagttcaattcgaatcaatatgtgattggttttgattaatcctgacactattttttcaggaaggcaatgaccattttttgactttttgccagggaagttgttgttgattttgagtatggaaagatttaatggaatgtgtaattcaattaactaaatgaatttaaatggataattgtttcgttgtgtgaatcccactctatccatgtggaattatttgcgggtcgcgtcacatttaatcataaataatcttgttgtgattacttttgaaaattagagtgagtgcacaacattccgggtgtgtggaatacccggttacctcttcttcaggagatcgttatggagatcctctacaacatctttaccgtgttttttaaccaggtcatgaccaatgccccgttgttgctgggtattgtgacctgtctgggctacatcctactgcgcaaaagtgtcagcgttattattaaaggcacgattaaaaccataattggtttcatgttgttgcaggcagggtccggcatcctcaccagcaccttcaaaccggtggtggcgaaaatgtccgaagtctacggcattaacggcgcaatttccgatacctacgctagtatgatggcaaccatcgaccgcatgggcgatgcctatagctgggtgggttacgccgtattgttagcgctggcgctgaacatctgttacgtgctgttgcgtcgcattaccggcattcgcacaatcatgttgaccggccacatcatgttccagcaggccgggttgattgccgttacgctgtttatcttcggctactccatgtggaccaccattatctgtaccgcgattctggttagcctctactggggcatcacttccaacatgatgtacaagccgactcaggaagtgacggatggctgtggtttctccatcggtcaccagcagcagtttgcaagttggattgcctataaagtcgcgccgttcctcggcaaaaaagaggagagcgttgaagacctcaaattgccgggctggctgaacattttccacgacaacatcgtctccacggcgattgtgatgaccatcttctttggtgccattctgctctccttcggtatcgacaccgtgcaggcgatggcaggcaaagtgcactggacggtgtacatcctgcaaactggtttctcctttgcggtggcgatcttcatcatcacgcagggtgtgcgcatgtttgtggcggaactctctgaagcatttaacggcatttcccagcgcctgatcccaggtgcggttctggcgattgactgtgcagctatctatagcttcgcgccgaacgccgtggtctggggctttatgtggggcaccatcggtcagctgattgcggttggcatcctggtcgcctgcggctccagcatcctgattattcctggctttatcccgatgttcttctctaacgccaccatcggcgtgttcgctaaccacttcggcggctggcgtgcggcgctgaagatttgtctggtgatggggatgatcgaaatctttggttgcgtctgggcggtgaaactcaccggtatgagtgcctggatgggcatggcggactggagcattctggcaccgccgatgatgcaaggcttcttctccatcggtatcgcctttatggccgtcatcattgtaattgcactggcttatatgttcttcgctggccgcgcgctgcgcgcagaagaagatgcagaaaaacaactggcagaacagtctgcttaataaggagttttgattatgaccgtacgtattctggctgtgtgtggcaacggacaaggcagttccatgatcatgaagatgaaagtggaccagtttttaacccaaagtaacattgaccatacggtaaacagctgcgcggttggcgagtacaaaagcgagttgagtggcgcggatatcatcatcgcttctacgcacattgcgggcgaaatcaccgtgaccggcaacaaatacgtggttggcgtgcgcaacatgctctctcctgccgactttggcccgaaactgctggaagtgatcaaagagcatttcccgcaggatgtgaagtaaggacgcgccatgaaattacgtgatagcctggcggaaaataaatccatccgcctgcaggctgaagcagagacatggcaggaagcggtgaaaatcggcgttgacctgctggtggcggcagatgtggtagagccgcgttactaccaggcgattctggatggcgttgaacagttcggtccttatttcgttatcgctccgggcctggcaatgccgcacgggcgtccggaagagggcgttaagaaaaccggtttctctctggtaacgctgaaaaagccgctggagttcaaccacgatgacaacgatccggtggatatcctcatcaccatggcggcggtcgatgccaatactcaccaggaagtgggcatcatgcagatcgtcaacctgtttgaagatgaagagaattttgaccgtttacgcgcctgccgtaccgagcaggaagtactggatctcattgaccgcaccaacgcggcagcttaagaaggaattgaacatgagtttaccgatgttgcaagtcgcgctggacaaccagactatggatagcgcctacgaaaccactcgcctgattgccgaagaagtcgacattatcgaagtgggcaccattctgtgcgtgggcgaaggcgtgcgtgcggttcgtgacctgaaagcgctctacccgcacaaaatcgtactggcagacgccaaaattgccgatgcaggcaaaatccttagccgtatgtgcttcgaagccaacgctgactgggtgacggtaatttgctgtgcggatatcaacaccgccaaaggcgcgctggacgtggcaaaagagtttaacggcgacgtgcagatcgaactgaccggttactggacctgggaacaggcgcaacagtggcgcgatgcaggcattgggcaggtggtttatcaccgcagccgtgacgcgcaggccgcaggcgtggcgtggggcgaagcggacatcaccgcgatcaaacgtctttccgatatgggcttcaaagtcaccgtcaccggaggcctggcgctggaagatctgccgctgttcaagggtattccgattcacgtctttatcgcgggccgtagtatccgtgatgccgcttctccggtggaagccgcacgtcagttcaaacgttccatcgctgaactgtggggctaaggagcggatatgttgtccaaacaaatcccgcttggcatctatgaaaaagcgctccccgccggggagtgctggctggaacgcctgcaactggcaaaaacgttaggcttcgattttgtcgaaatgagcgtagatgaaactgacgatcgcctgagccgcctcaactggagccgcgagcagcgtctggcgctggtcaatgcgattgttgaaaccggcgtgcgcgtgccgtccatgtgcctttctgctcatcgtcgtttcccgctgggcagtgaagatgacgcggtgcgggcgcaggggctggagattatgcgtaaagctatccagttcgcccaggatgtcggtattcgcgtgatccagctggcgggctatgacgtttactatcaggaagccaataacgaaacgcgtcgtcgtttccgtgacggcctgaaagagagcgttgagatggcaagccgcgcgcaggtgacgctggcgatggagatcatggattatccgttgatgagctccatcagcaaggcgctgggatacgcgcactatctcaacaatccgtggttccagctctacccggatatcggcaacctgagcgcgtgggacaacgatgtgcagatggagttgcaggccggaatcgggcatatcgtcgcggtacatgtgaaagacaccaaacctggcgtcttcaaaaacgtgccgtttggcgaaggtgtagtggatttcgaacgttgtttcgaaacgctcaaacagagtggctattgcgggccgtacctgattgagatgtggagcgaaacggcggaagacccggcggcagaagtggcgaaagcgcgtgattgggtgaaagcgcgcatggcgaaagcgggcatggtggaggcggcataatgcaaaagctaaaacagcaggtatttgaagccaacatggagctgccgcgctacgggctggtgacctttacctggggcaacgtcagcgctatcgaccgcgaacgcgggctggtggtgatcaagcccagcggcgttgcctacgaaaccatgaaagcggccgatatggtggtggttgatatgagcggcaaggtggtggaaggggagtatcgcccatcttccgacactgcgacgcatctcgaactctaccgtcgttacccgagccttggtggcattgtccatacccactccactcatgccaccgcatgggcgcaggcggggctggcgatcccggcgttaggcaccacgcacgccgactacttctttggcgacattccgtgtacgcgcgggttaagcgaagaagaggtgcagggcgagtatgaactgaacaccggcaaagtgattatcgaaacgctgggcaacgccgagccgctgcatacgccgggaattgtggtgtatcagcacgggccgttcgcctgggggaaagatgctcacgatgcggtgcataacgcggtggtgatggaagaagtggcgaaaatggcgtggattgcccgcggcattaacccacaactcaatcacatcgacagcttcctgatgaataaacacttcatgcgtaaacacggtcctaacgcttattacgggcagaagtaaaacacgcgctgcggaaatttccttcctcgggagataactggtctaattccgcagccgtttttcaaaaaaaagccccctgcgaagggggcaaagcaaactatggcaatgtttcgttggttatacctggtgttagcgataaatatccgcgctggcgtgcatattgccgttactccccggttcccgcatcagaattacgtggtagtacgttgcgccttgcgcatctgtttcttcatttaatgcctgacgtgcttcgctttcagtggcgaaattatgattgatataaatcacgcctaagctttgcacatcgtccatatttctggcctggtggttattaatttcaatggctgcccatgtatttgcacttagcaaaagcacagccagaagggctaaaacacgactgaacatagatacctcctcgacggctgactttgtgtgctctcctctgtgatgatcttctgatttaattttaatcaatgataaagaagttgatggtgaccatttctgatgcagttgttcaaaaaaacaccatgatgaagtgtgatgaacttcaaatcagcgtgttagaggttaattgcgaaaggggagatttatttcggctctgcccttgagtttagcgaggcatacaagtactataacgcgtcatttttcagccgacctttaacacgttccttgcctccccgggattcggctgacccagacaggaggctgaataatccgtaaggagcaattcgatgcgtcattacgaaatcgtttttatggtccatcctgaccagagcgaacaggttccgggcatgatcgagcgctacactgctgccatcactggtgcagaaggcaagatccaccgtctggaagactggggccgccgtcagctggcttacccgatcaacaaactgcacaaagcacactacgttctgatgaatgttgaagctccgcaggaagtgatcgatgagctggaaactaccttccgcttcaacgatgccgttatccgcagcatggttatgcgtaccaagcacgctgttaccgaagcatctccgatggttaaagcgaaagacgagcgccgtgagcgtcgcgatgatttcgcaaacgaaaccgctgatgatgctgaagctggggattctgaagagtaatttctgatgaccaaccgtctggtgttgtccggcaccgtgtgcagggctccccttcgaaaggtcagtccaagtggaattcctcactgccagttcgtgcttgagcatcgttctgtgcaggaggaagccggctttcaccggcaggcgtggtgtcaaatgcccgttattgttagcggacacgaaaaccaggccattactcacagtataacggtcggcagtcgcataaccgttcaggggttcattagttgccacaaggcaaagaacggactgagcaaaatggttttgcatgccgagcagattgaattgatagattctggagactaaccatatggcacgttatttccgtcgtcgcaagttctgccgtttcaccgcggaaggcgttcaagagatcgactataaagatatcgctacgctgaaaaactacatcaccgaaagcggtaagattgtcccaagccgtatcaccggtacccgtgcaaaataccagcgtcagctggctcgcgctatcaaacgcgctcgctacctgtccctgctgccgtacactgatcgccatcagtaatcggtcacggtccattaatacgactttgagaggataaggtaatgcaagttattctgcttgataaagtagcaaacctgggtagcctgggtgatcaggtaaacgttaaagcgggctatgctcgtaacttcctggtaccgcagggtaaagctgttccagctaccaagaaaaacattgaattcttcgaagctcgtcgcgctgaactggaagctaaactggctgaagttctggcagctgctaatgctcgcgctgagaaaatcaatgcactggaaactgttaccatcgcgtctaaagctggcgacgaaggtaaactgttcggttccatcggtactcgcgacatcgctgacgctgtaactgcagctggcgttgaagtggctaagagcgaagttcgtctgccgaacggcgttctgcgtaccactggcgaacacgaagtgagcttccaggttcacagcgaagtattcgcgaaagtgatcgtaaacgtagtagctgaataattcgttattcaacgagacgtaaaaacgccgaccattggtcggcgttttgctttctatttttcgtcaggtattagtttcgcaagtagatccattcaccattctcttgtgtccataagtcaggatggtttgctggcgttagatacatacgagcgcaactgatgtctcgctcctgcggcactcgctcgaaacccaaaccgctgtagattgcggcactactacttaaggaacgcagaccaattttcaaatcatggggtaaatcagaatacgcgtttagcaatgcagcaatgatgaatccgagggcattagaaacgcctgtaacagtgcgaagttggtcgatataaagatcgattgttggtagttcagaactccagcaattaggcatttgggcaggaagggttacaacgtatcctatcgtttggccggtatagtctggagtaccataaccaggtcccaaaaccacttcgtgtattgtgtatttactgttgggttcgaaggattcgacatcttgcaataaatatttcagttctgcggttaacctcgcacccgcgtaagctttattgtatttctgggcgtgaatattatctaatgtagcttcatggttccatccaaaagaattatcaccattcattgtgattccatcgtaagcattacacctcgtcgctaacttattgaatgcttgccagtcactgagatctagtttgtggatctcaacagtacgtctgccatcgcaattatgatctcttccacgattactaagtaatgtagcgcgtgcgtattgatgaaattttaattttactggtttgtcggtggagctaaaacgagataaatatgcaggaaaactataaatagtcgttggtaatgtcattgtaatgttacctgtttaatgtttttataaatatcgcagctgaatgttcacagaaaaaaatcgatattaataaaaataagtttgttttctgaagtggtgaaaatagcggatggtgaaagatattaatatcaaaaatcgctcattatggatataacgatgcacccggggagaaaatgacttccacgccttacaccgtacattcttgttgtgcggtatgtaattattctacgctgtcggtatcggtgtattcgttaatcagcaggttagccagccacaaaaagccattgagaaaattattgattttacatgggattattatattgctaatccttggtttttaaaaattgtgcatagtgaaaatcaaagtaaaggtgtgcattatgcaaaaagtcagcgtctcttagaaattaaccatgcgcacttgcagttaatggaatccttattggatgaagggaagaaacacaatatttttaagccagatatcgacccattgcaggtgaatattaatattgctgcgcttggcggatattatttgatcaaccagcatacgcttggcctggtttatcacatcagtatggttagtccccaggcactggaagccagacgtaaggtcatcaaagagacaatccttagctggcttttggttgaccctagttctaccgcgcacgaataattaccgcgcacgaataaaactgccatccggctggcgggtgaacaggacctgttgattattccccgtatcaatggttaagcccgtcaccacgccgctggcgttctggcggattttcaccatctgcccgttttgcaaattactcagcggcttacccgcgccttctacctgcgccattgcatagacatcggtagcgggcagtccgtggtcgcggaacagctgcgccatcgttttaccgggttcgacacggtaagagcgccattgattatcaattccgctatctggctggaatggttgcgtttgggtagtttgcggctgctcttctggctggccttcctgtataggttctggagcgaccggagccacctgatcaggatcattttgtggggtaactaattgcgcccgcagctgttcttctgtcggcggttgactttggctctgaatatctaactgcgcttcacgcgtcaccaccggcgcgttgggcgtatcatcagatggaagcagaaatccgaccaccaatacaatggcggcaataatgatcccccgacgatgcatcggcggcagcgggtccatgaagcgaaaattgtccggcgcgtgccagactttctccagggttggttttagttcaaagcgcccgggcatggtttcctcctgctccgcgtcttgttcctcaatcatagcctatgaataagctaacgctatgatgtccgtggtaaacccgcctttattatattcatacgggatattgctattgtttctttttccctgggatttgtcatcattcccgcgacaaagttttacccaaagaagtgtggctgatatgctgcccgctactttataccctaagaaaggaaatacgatgaccaccccaacttttgacaccatcgaagcgcaagcaagctacggcattggtttgcaggtagggcaacaactgagtgaatctggcctggaagggctgctgccagaagcactggttgcaggtattgccgatgcgctggaaggcaaacatccggctgttccggttgatgtggtgcatcgcgcgctgcgtgaaatccacgagcgcgccgatgccgttcgtcgtcagcgtttccaggcgatggctgctgaaggtgtgaaatacctggaagaaaacgccaaaaaagaaggtgtgaatagcaccgaatctggcctgcaattccgcgtgatcaaccagggtgaaggcgcaattccggcacgtaccgaccgcgttcgtgttcattacaccggtaaactgatcgacggcaccgtgtttgacagctccgttgctcgtggtgaacccgctgaattcccggttaatggcgtgatccctggctggattgaagcactgactctgatgccggtaggttctaaatgggaactgactatcccgcaggaactggcatatggcgagcgcggcgcaggcgcatccatccctccgttcagcaccctggtgtttgaagtcgaactgctggaaatcctctaagcagcgcattctgttcccctcgaacgagaggggagcaggcattcagcaataaacccttcagtttgccaaacggcgctattttgtgttgcaaagaccccgtaagcgtgtatttttgtgagctgtttcgcgttatcaccgtgatatgacactcactttaaacataaaattaacattagatctaaatcttagtattcatcccgcgtattgttacctaatatcgatgagtcccgatacagattcgtcgtatcatagactgactaaaggccgtagagcctgaacaacacagacaggtacaggaagaaaaaaacatggtagatcaggtaaaagtcgttgccgatgatcaggctccggctgaacagagcctacggcgcaatctcacaaaccgacatattcagcttattgccattggcggtgccattggtacggggttgtttatggggtctggcaaaacgattagccttgccgggccgagcatcattttcgtttatatgatcattggttttatgctctttttcgtgatgcgggcaatgggggaattgctgcttagcaatctggaatacaaatcttttagtgacttcgcttccgatttactcgggccgtgggcaggatatttcaccggctggacttactggttctgctgggttgtaaccggtatggcagacgtggtggcgatcacggcttatgctcagttctggttccccgatctctccgactgggtcgccagcctggcggtgatagtgctgctgctgacgctcaatctcgccaccgtgaaaatgttcggtgagatggagttctggtttgcgatgatcaaaatcgtcgccattgtgagcctgattgtcgtcggcctggtcatggtggcgatgcactttcagagtccgactggtgtggaagcgagtttcgcgcatttgtggaatgacggcggctggttcccgaaaggtttaagtggcttctttgccggattccagatagcggttttcgctttcgtggggattgagctggtaggtacaacagctgcggaaaccaaagatccagagaaaagtctgccacgcgcgattaactccattccgatccgtatcattatgttctacgtcttcgcgctgattgtgattatgtccgtgacgccgtggagtagcgtagtcccggagaaaagcccgtttgttgaactgttcgtgttggtagggctgcctgctgccgcaagcgtgatcaactttgtggtgctgacctctgcggcgtcttccgctaacagcggcgtcttctctaccagccgtatgctgtttggtctggcgcaggaaggtgtggcaccgaaagcgttcgctaaactttctaagcgcgcagtacccgcgaaagggctgacgttcagctgtatctgtctgctcggcggcgtggtgatgttgtatgtgaatcctagtgtgattggcgcgttcacgatgattacaaccgtttccgcgattctgtttatgttcgtctggacgattatcctttgcagctaccttgtgtatcgcaaacagcgtcctcatctacatgagaagagcatctacaagatgccgctcggcaagctgatgtgctgggtatgtatggcgttctttgtgttcgtggtcgtgttgctgacactggaagatgacactcgccaggcgctgctggttaccccgctgtggtttatcgcgctggggttgggctggctgtttattggtaagaagcgggctgctgaactgcggaaataaccgcattatcatgctggatggcgcaatgccatccagcttttagatcactcacccgccagcgcgcgtgggaacagtacattgttttccagactgatgtgatccatcaggtcatcaatcagttcattaatgccgttatacatcgctttccaggtggtgcaggcttctggcggcggtgtgacgttattggtggtgtgtttaatcacttccagcagttcgcccgcttcatcgtgctcgctttccattacgctgattggccccattgcctggctgcccatgccttgtttgatcatcgggaagaggatctgctcttctttcatcatgtggctggaaagctcttcatgcagcatggtcaggtattttgtcagcccttttggcacgctcggtttgtcggcgtgaacgcgctcgactttagtcgcttgcagaatcagctccggcagttgctcgcggtgacgatcgtggtagcgcacgatgatatggtcgatgatttctgccagcggggcgctacgccagtctttctcaatcggttgttcagcgagctttgccagttcagcttcaatgacctcaacatccagttctttacgtgccgccgcgcgcgccagcgtctgcttaccgccacagcagtaatccatatcatatttacgaaacagagcactagcgcgaggaatagagagcgccagttcacctaaaggttggtcgcgataagccatagctgatacctcattcttaataagataagatgtattttaaatgcatctttaaggcaaaagctataacccttacgtagcagaggcttatttaactcactgccagcgtgtcaactttcactgacagattcagttaaaggtttttctggttttgctctgaccgcgatgaccacgccaatcactaacagcgcgataccgctcagcgtcattagcggcggcatttgctggcggagtaaaaaggtgtacagcaaacctgccagcgtttcgaaaacaatcagcggcccgagaatcactgtcggtaatagctggctggcgacgttccagcagagtgcgccaacccaactgcaaagcacggctatcgcaaccatcagactaataaacaccagcggacgggggccaaagggtagggagaagtccggcgtttgcgtattcagccagtaacaagcgacgagatagccgataagactaaccggcagtgtgaccagcgcctgcgctgttgcccacatcatcggatgtttgtcgggattttcccgcagccagcgggcgttgcgcagggcataccacgcccagcagaccacggaaactaacgccagcacgatgccagaggtataacgtgcccagtcaaaatcggggagtccgtggtttaactcagcaatattcacacacgccaggccgatgccaatacaaatcagtgctggggcgagttttccccacgcgagtttgccgtcgcgctggctataaagcagattggcaaagacaggaatgaccaccggcagggtgccgataatcatcgtggaaacaggcgcgccagtacgttgaatggcactggcaaggcagaagtaatagatgaggttgcccatcatagtgagcatcaaggcggtaagccagtcgcgacgcgccaactgacgcagacgcacgcgtcccagccaggcaatgggcagcgcaattaaccctaacgccagataacgccccatgctctgcaacatcgccgggtattccggcacgatcaacggcccgacaaaaataagcccccacatcaaccctgctaacagggcgtacagcacgccgctaatcattactggcatccattgatctgtcagaagaaagttcaggaagcagacatgattgctcccggcatcccgtcattatcagagaggatgcgggaggatgccactttaattaattagttattaacattaaaaagatggcttacgctttcggctaacgttgtcgttgggtggccaatcaatttgctaagtgttttgctgtcatcaaacagaccgcctttgcttgcgccaacgtcagaatccgccagcatatccgccagtccgtcgggcagtccgacgcttttcagtgccgcggcgaaatcggcttcgctcagattttgataggtaacctgtttgccgctctgtttggtcagctctgccgctaactgtgtcaacgtccaggcactatcgcccgccagttcgtaaaccttgccttcgtgaccggcttcgctaatcacgcgtgccgcagctgccgcataatctgcccgcgttgcactggcgattttgccatcgcccgccgcaccgataaatacgccgtgttccagtgctgccggggcgctggcgaggtagttttcgctgtaccagccgttgcgcagcagggtgtaaacgatgccagaatcagccagcattttctccgtctcgatgtgctcatcggcgaggccgagcggggaggtatctgcatgtagcaggctggtataagcgataaatttcacgccagccgcctttgcggcattaataacattacgatgctgcggggcacgttgacccacttcgctggaagagatcagcagtagtttttccactccctgaagtgcagatgtcagtgcggcttcatcgccgtagtcagcctgacgcacggtaatgccttgtgctgccagggcttgggcttttgccggattacgaacgatagccactatttggctggcaggaaccgttttcatcaaggattcaataacatagtgaccaagttggccagtggcaccagtaatagcgatcatgggaagtctccatcgttttgtcttgtgtttaaatacgctaacacctaaacttacttttagtaagtacgtacaaaaaggtaagtatgaaatgagtcaggttagcctgagccaacaactgaaagagggtaatctctttgcggaacagtgcccgagccgcgaggtgttgaaacacgtcaccagccgttggggggtgttgattctggtggcgctacgcgaaggtactcatcgctttagcgacctgcggcgcaaaatcggtggggtgagtgaaaagatgcttgcgcagagcttacaggcgttagaacaggatggttttcttaaccgtatcgcgtatccggtggtgccgccgcatgtggaatatagcctcacgccgctgggcgagcaggtgagcgaaaaggttgctgcactggcggactggattgagttgaatttgcccgaggtgttggcggtgcgggatgaacgtgcggcataactgccggatgcgctgagcttatctggtctacggtgcatggcttgtagggcggataagatgcgccagcatcgcatccgccaataaatgccggatgcggttgatgatttataggccgaaaaagaagtgttttacttactcaaatccacctgataaatcgcaaacccgatatcatcggtcgcgactttattcatcggatactgccctttctctttaataaacgctgcggctttatcactcggagaggtttcgaaacggatatccagtttcttatcgccagctatcggtgctaaacgccagttgttatctgccgccgggtgaatttcccccgcacgtttgctctcatcagcaatccacgctgccagcacgctgcggttctcatccggactagcaaaagcgatatggctgtcgcccgtaccggcaaatttgccgccgtaagcgcgatagttattggtggcaaccaggaacatggcgttcggatcaatcggcttgccattaaaggtcaggttcttaatcctttccgcattggcattaatcatctggcactcgccgtcataacgggcgggctgggtaacatcaatctgataattcacaccatcaataacatcaaagttataagtgcggaaaccatcccagttgatgagactctgtggtttcgtgctgttgggatcaatctggttaaactgtcccgcggagcactccagccactctttcacctctttaccgctggctttcaccacaatcagcgtattgggatagagataaagatcggcggcattacggaaggtcaactggcctttttccacctccacatagcttgccgggtcatttttgcgaccaccgactttaaacggtgcggcagcactaagcaccggcagttttgccagatccggatcgccctgaatgtaatgctcgacatacgctttttgcgcgttgttcaccacctgcacggtcggatcgtcctgcaccagcgccagatagctatacatattgtcggcagatttaccgattggcttgctgacgaactggcgtgtggcatcgtgatcggctttgagtgtttctaccagcttgctgtcttccgccgcgagggattttttattagcgatgtcgtaaatcggtcgtgcttccgctttcgcctgcgtcacctgccatttaccgctgtcattactgagttgtaagtcgaccacaccaagatgatcgccccacatgcctggcattaccgccggaacaccattcagcgtgcctttggcgatatcagccccttcgatatcagcaaaatctttacctgggaaaacggcgtgagcatggccaaacataatggcgttaacgcccggaatttcactgaggtaataaacactgttttccgccatcactttatacggatcggcagatagcccggaatgtgccagaacgacaacaacatcggcacctttctcgcgcatttcaggcacgtatttgcgcacggtttcggtaatatcattcaccgtcactttcccggataaattagctttatcccagcccatgatttgtggtggcacgacgccaatatagccaatcttcagcgtctgtttttttccgtctttatcgaccacttcggtgtctttaattaaatacggtgtaaacattggctgtttggttctggcgtcaatgacgttggcatttacataagggaatttcgctcctgccagcgcatttttcaggtaatccagaccgtagttaaactcgtggttgccaagcgttccgacggtatagtccagcgtatttaatgccttatagaccgggtgaatatcacctgcttttaatcctttcgcgctcatgtaatcggccagcggactcccctgaatcaaatcgccgttatcaaccagtacgctgtttttcacttcattgcgggcatcgttaatcaggcttgccgtacgtaccagtccgaatttttccgtggcggtgtctttgtaataatcgaaatccatcatgttgctatgcagatcagtggtttccatgatacgcagatcgaccgtcgctgcattcacactggcggcaatcagcgtggccaggagcgttgcgctaaacttaatcatcagggacatccttttatcatcgggaatacgaaagaaaagggagaataaacgtcttacttatagaacagtgaagaatgccacaattttacgctttgaaaatgatgacactatcacagttggcgcattcattaacgatagggtataagtaaaacaataagttaacaccgctcacagagacgaggtggagaaatgttagatcaagtatgccagcttgcacggaatgcaggcgatgccattatgcaggtctacgacgggacgaaaccgatggacgtcgtcagcaaagcggacaattctccggtaacggcagcggatattgccgctcacaccgttatcatggacggtttacgtacgctgacaccggatgttccggtcctttctgaagaagatcctcccggttgggaagtccgtcagcactggcagcgttactggctggtagacccgctggatggtactaaagagtttattaaacgtaatggcgaattcaccgttaacattgcgctcattgaccatggcaaaccgattttaggcgtggtgtatgcgccggtaatgaacgtaatgtacagcgcggcagaaggcaaagcgtggaaagaagagtgcggtgtgcgcaagcagattcaggtccgcgatgcgcgcccgccgctggtggtgatcagccgttcccatgcggatgcggagctgaaagagtatctgcaacagcttggcgaacatcagaccacgtccatcggctctagcctgaaattctgcctggtggcggaaggacaggcgcagctgtacccgcgcttcggaccaacgaatatttgggacaccgccgctggacatgctgtagctgcagctgccggagcgcacgttcacgactggcagggtaaaccgctggattacactccgcgtgagagcttcctgaatccggggttcagagtgtctatttactaaattcagatggcagaaacagtgtatttcctgattctgccatcctgatttctcccaacctaaaaagttataaataaaaagagattgtatttaaagtgcaaaaattcaattgctaataagttacattttaataatgagcgttttttgatagtttacttctatagtgagatatttaatggcgacataaagtaaccaaataaaataaggttgtcatatgttacccaggatcagacacaataattttattggtgcggtggagttatttgtaaagtctagctatacaaaaacacatagtaacaatttttttaacaacatccatcatgcatttaagaaaaaagattggattagcaattatgatagcctgttaactttgagggagttctttcgttgcgcaactcagattgataaaagtggttatcaggtgcttagtagtaaaaatgaaactgttcacgccatggataagtttcttatcagtttcagccttaaagataacggtgccgaatatacaatgacattgcgaggtagtggatttgaatacgaagaaatacccataacaataaatgaatataacagtttcatggatttcaaaaaccgtgaatttccgttagaacaaaacagacgattgtatgcccgggatattctacagaaaaaacagtctgacataccgaaaaggattaaaggttatattcaccaggcgattggtgacgtgtctttaggttatgccttattggaggatatagtaagcaaattaaaacggggtaaatttgaactccaaataccaggaggtggaattaaagaatgcgatggatggtatatttacgaaaaaataattgatgataattttgccatagtcatagaatctttgggctttgcgcttaaaatctatggaggggatgaacgttttcgtaatggttcctctgttgttttggaggatgaagattactctcttatttataattttctggttaatgcaggttgccaacaagtcgaattagccgaacaagtggatgcgatagtaagtgcgaatctggccgcagatagcgatattaccaaagaaaagatttgcgagaaatataaaagcaccattgaggcgtttaaaaaagagcaactagcgttaccagtattagttcggcgtaagaacagtgagacttaattcccctatcccatagataacgataggggaaaattatttttgcagaatttatgttattgccattatttgagcaacttttgcagcaggtccatcacttgctgcacctcttccggtgtgagcgccccgtctttggcccattgcacgcgaccatccttatccagcaccactacagcggaactttcttcatccagctgccaggcaccgagcgcgacgccattgctatcgacaataaactggctccagggataaagctttttattactctccagactgctgcgcacaaacatcccactacccggaatcgcgtcgtcggtgttaacaatggtggtggtctggtaacgatcgtgcggtaacttcgcacttttaatcgcttcaatcagcgtcgcgtttttctcttttgcagaggtgcgaccagcaatatgttgcagtactcgcacttttcccactaactgcgcgctgttccaggttttgtagctaaactgatctttatcaagcaccaactcgccccgatcggtaatgccaatcggcggcactcgctgaccggtttcgaactgatgtgcggaagccatcatcggcaacagcaggcaggtgagtgccagaatcttgcgtagggtcatggtgtttccttcttatgatatgcaggtgatccgaccacttgggtctgagttttaatcatatgtgctatttatcgaatttcccgcaagtgtgatgccagtttgcggtcaagcgcacaaatcatatgaaaaatgaatgcttatactgaagaccgcgcttcggtaaaaagataattctgaataattgtaacctttaggtaaaaaaagttatacgcggtggaaacattgcccggatagtctatagtcactaagcattaaaatttgcgcctcataatagttgggccgattgtggcaccgcacaggcgtaatactcagcaggagataacaatgaaaattttccaacggtacaacccacttcaggtggcgaagtacgtaaagatcctgttccgtggacggttatacatcaaggacgttggcgcttttgaattcgataagggtaagattcttatcccaaaagtgaaggataagctgcatttgagtgtgatgtccgaagttaaccgtcaggttatgcgtctgcaaacagagatggcttaaccaaagtgctatgcagtaaaaagtgctatgcagtaataagacggctcctgattcaggagccgttgatgtttctgggggttacgcgacgctttcttctttatctttagcgtcaggcagttttgggctaagggcggtggccttgctgtcgatccgggtcaccagcagctggtcgatgcggtagttatcgatatccaccacttcaaatttgtagccggcgaatttcacgctatcggtgcgtttcgggatcttacgcagcataaacatcataaagccgccgatggtttcgtagttgccgctctgcgggaactcgtcaatatccagcacgcgcatgacgtcgtcaattggggtgccgccgtcaatcagccaactgttctcatcacgggcgacaatctgctcttccagcccctgaccgaccagatcgcccatcagcgtggtcatcacgtcattgagggtgatgatccccaccaccagcgcgtactcgttcatgatcaccgcgaagtcttcacctgcggttttaaaactttccaacgcctcactaagggttaacgtatccggcacaatcagcgtgttgcgaatttgtacgccgctgttcagtgccaggctttggttagccagcacgcggttcagcaggtctttagaatcgacataaccgatgatgtggtcaatatcttcattacagacgaggaacttagagtgcggatgttccgccaccttattcttcaggctttgctcatcttcgtggagatcaaaccaaatcacgttttcacgcggtgtcatactagacggaacggtacgggattccagctcaaagacgttttcaatcagctcgtgttcctgtttacgtaacacgcccgccagcgcaccggcttccactaccgcgtagatgtcatcagaagtgatgtcatctttacgtaccattggcagtttgaaaatacggaagattatgttcgccaggccgttgaagaaccacaccagcggggtgcaaacgtacaggcagaagcgcatcgggttgatgatacgcaaagccacagcttctggcgcaatcataccgatgcgtttcggggttaaatccgcaaacaggataaacatgccagtcactaagctgaaagagagaataaagctcagttgctcagagagctctgcgctcatatagcgggagaacaggctgtgaaaagctggagaaaatgccgcatcaccgacgataccgccgagaatcgccactgcgttcagaccgatttggaccacggtaaagaacatgccgggattttcctgcatattcagaacgcgttgggcatttatattgccttcatcagccagcagtttaagtttgattttgcgactggcggcaaggctgatctcggacatgctgaagaacgcacttacagcgatcaagcagagtatgactaaaatactgtttaacatatcttatccgacctttcaggccagatcctcggaaggggaagttgattaatttgtgtgaaatacacattgaaagccgattcgaagaaagtgaaccggcattttcagtggctagtatagcgtaaggtactgtaaagccgccagagggttaaaattcagacagctgaaaaatgcaaaactgcctgatacgctatgccgatcaggcctacgcagtccttgcaatatattgaatttggacgattttgtaggcctggtaagtcgtttacgccgcatcaggcatagacaaagagcactttatcaacaaactacatttgtacccgtaacgttatgcttccggcggcagacagacgccaattccgccaattccacagtaaccatacgggtttttatgcagatattgctggtggtcatcttcggcataataaaacggtgtggcgttagcgatttccgtggtgatgtgacgatcgtcatcggcggcaagcatcgccgcctgaaaacgttccagactggcgcgagctgcggcatcctgttctggggtcagcggataaatcgcactacgatactgcgtgccgtggtcattgccctgacgcattccctgggcgggatcgtgattctcccaaaatacctgtagcaactgctcatagctgatgacggaaggatcgtaaacaatgcgtaccgcttcggcatgacccgtatcaccggagcacacttcccgataagtcggatttggcgtatagccgccggtatagcctgcggcggtgctgtaaacgccgggtaactgccagaacagacgctccacaccccagaaacaacccatcgcaaaaatggcaatctccattccgtcaggtacattggtcatactgtgaccgttgaccgcatgcagcgtggctacgggcatcggggtgttacgtccaggcagggcatcggcgggggaaaccagatgctttttatcaaataaactcatggtgtcgctctcccgaaaatcggtcattggggttaaggttgtaacaagaggcgtatttgcacacaataaccaccgtgaataggtctaaagtaaaacataagaaatatttggggtttagtctgctttttaatccatattactggatttttgttaagccgtttaacggcgttccaggggcaggaaaaaaggatattcaggagaaaatgtgcgctatatccgacagttatgctgtgtaagcttactctgcttaagcggatctgccgtcgccgcgaacgtccgtctacaggtcgaggggttaagcggacagctggaaaagaacgttcgtgcgcagctttctacgattgaaagtgatgaagtgacgccagaccgtcgctttcgcgcacgcgtcgatgatgccatccgcgaaggtctgaaagcgctgggttattaccagccgaccattgaatttgatctccgtccaccgccaaagaaagggcggcaggtattgatcgccaaagtcacgccaggcgtgccggtgttaattggcggcaccgatgtggtattgcgcggcggcgcgcggaccgataaagactatttgaaattgctcgatactcgcccggctattggcacggtactgaaccagggcgattatgaaaatttcaaaaagtccttaaccagcattgcgttgcgtaaaggttatttcgatagcgaatttaccaaagcgcagctgggcattgcgctcggcctgcataaagccttctgggatattgattataacagtggcgaacgttaccgctttgggcatgtgacctttgaaggaagtcaaatccgcgatgaatacctgcaaaatctggtgccgtttaaagagggcgatgagtacgaaagcaaagatctggcagaactgaaccgccgactttctgctaccggctggtttaacagcgtggtggtggctccacaatttgataaagcgcgcgaaacgaaagtattaccattgacgggcgtggttagcccgcgaacagaaaacaccatcgaaaccggggtcggttactctacggacgtgggaccgcgcgtgaaagcgacgtggaaaaagccgtggatgaactcttatggtcacagtctgaccaccagtactagtatttccgcgccggaacagaccctcgacttcagctataaaatgccgctgctgaagaatccactggaacaatattatttggtgcagggcggttttaagcgcactgacctgaacgataccgaatctgactccactacgctggtggcttctcgctactgggatctctccagcggctggcagcgtgccattaacctgcgctggagtctcgaccactttactcagggtgaaattaccaataccacgatgctgttttatcctggggtgatgattagccgcacgcgttctcgtggtggcctgatgccaacctggggcgacagccaacgctactctatcgactactccaacacggcctggggtagtgatgtcgatttctccgttttccaggcgcagaacgtctggatccgcacactgtacgatcgccatcgttttgttacacgcggcacgctgggctggattgaaaccggtgatttcgacaaagtaccgccggatctgcgtttcttcgccgggggcgaccgcagtattcgtggctacaaatacaaatctatcgctccgaaatacgccaacggtgacctgaaaggggccagcaagttgataaccggaagcctggaataccagtacaacgtgaccggaaaatggtggggcgcggtgtttgtcgatagtggcgaagcggtaagcgatattcgccgcagcgactttaaaaccggtaccggggtcggcgtgcgctgggaaagcccggtcgggccaatcaaactcgattttgccgtaccggtcgcggataaagacgaacacgggttacagttttacatcggtctggggccagaattatgagtttatggaaaaaaatcagcctcggcgtggttatcgttatcttactgttgctgggaagcgtggcgtttctggtgggcaccaccagcggcctgcatctggtatttaaagcggcggatcgctgggtgccaggactggatattggcaaggtcaccggcggctggcgcgatctcaccttgtctgacgttcgttatgagcagccaggcgtggcggtaaaagcgggcaatctgcatctggctgtcgggcttgagtgcctgtggaacagcagtgtttgtattaatgatctggcgctgaaagacattcaggtcaacatcgacagtaaaaaaatgcctccttctgaacaggttgaagaagaggaagatagcggtccgctggatctctccacgccgtatcccatcaccctgacacgggtggcactggacaacgtcaacattaagattgatgacaccacggtaagcgtgatggacttcacctccggcctgaactggcaggagaaaaccctgaccctgaaaccgacgagcctgaaaggcctgctgattgctctgccgaaagtggcggaagtggcgcaggaagaagtggtcgaaccgaaaattgaaaatccgcagccggatgaaaagccgctcggcgaaacgctgaaagatctcttttctcgcccggtattgccggaaatgaccgacgtgcatttgccgcttaacctgaacattgaagagtttaagggcgagcagctgcgcgtgacgggcgacacggacatcaccgtgagcaccatgctgctgaaagtgagcagcattgacggcaatactaaactggacgccctggatatcgattccagtcaagggatcgtcaacgccagcggcacggcgcagctgagtgacaactggccggtggacatcactctcaacagtacactgaacgtggagccgttgaaaggtgaaaaagtgaagctgaaaatgggcggcgcgctgcgcgaacagctggagattggcgttaatctttccggtccggtggatatggatttacgcgcccagacgcgactggcggaagccggattgccgctcaacgtggaagtgaacagcaaacagctttactggccgttcactggtgagaagcagtatcaggcggatgatctgaaactgaaacttaccggcaaaatgaccgattacacgctctctatgcgtacggcagtgaagggacaggagatcccgcccgcgactattaccctcgacgccaaaggtaatgaacagcaggtcaatctcgacaaactcaccgtcgcggcgctggaagggaaaactgaactcaaggcgttgctcgactggcaacaggccattagttggcgcggtgagctaacgcttaacggcattaacaccgccaaagagttcccggactggccgagcaaactcaatggcttgattaaaacccgcggtagcctgtacggcggcacctggcagatggacgtgccggagttgaagctgaccggtaacgttaaacagaacaaagtgaacgttgacggcacgctgaaaggcaacagttatatgcagtggatgatcccagggcttcatctggaactcgggccaaacagtgccgaagtgaaaggcgagctgggggtaaaagatctcaatcttgatgccaccatcaacgcgccggggctggataacgcgctgccggggcttggcggtacagcgaaagggctggtgaaagtacgcggcacggtggaagcgccacaactactggcagatatcaccgcgcgcggcctgcgctggcaggaactttccgtggcgcaggttcgcgtggaaggcgatatcaaatccaccgatcagatcgccgggaaactcgacgtacgcgttgagcaaattagccagccggatgtaaatatcaacctcgtcaccctgaatgccaaaggcagcgaaaagcagcacgagctacagttgcggattcagggggagcctgtctccgggcagcttaatctggcaggaagttttgatcgcaaagaagaacgctggaagggaactcttagcaatacccgcttccagacgccggttggcccgtggagcctgacccgcgatattgcgctggattaccgcaataaggagcaaaaaatcagcatcgggccacactgctggcttaacccgaatgcggaactgtgcgtgccgcaaactatcgatgcgggggccgaagggcgtgcggtggtgaatctcaaccgcttcgacctcgccatgctgaaaccgtttatgccagaaaccactcaggccagcggtatcttcacgggtaaagcggacgttgcctgggacaccacgaaagaggggctgccgcagggcagtatcacccttagcgggcgtaacgtgcaggtaacgcaaaccgtcaacgatgcggcgctgcccgtggcgtttcagacactgaatctgacggcggaattgcgtaacaaccgtgccgaattgggctggaccatccgcctgaccaataacggccagtttgatggacaggtgcaggtgaccgatccgcaaggccgccgtaatcttggtggcaacgtcaatatccgtaacttcaaccttgcgatgataaaccccatctttacccgtggggaaaaagcagcggggatggtgagtgccaacttgcgtctgggtggtgatgtgcaaagcccgcagttgtttggtcagcttcaggttacgggtgtggatatcgatggcaactttatgccgtttgatatgcaaccgagccagcttgcggtcaactttaacggtatgcgcagcacgcttgccggtacagtacggacccagcagggtgaaatctacctgaacggtgatgccgactggagccaaattgaaaactggcgggcgcgggtaacggcgaaaggcagtaaagtgcggatcaccgtgccgccgatggtacgaatggatgtaagcccagatgttgtattcgaggctacaccaaacctgtttaccctcgatggtcgcgtggatgtcccttgggcgcgcatcgtggtgcacgatctgccggaaagcgcagtaggcgtctccagcgatgtggtgatgcttaacgataacctgcaaccggaagagccgaaaacggcgagcattccgattaacagtaacctgattgtccacgttggcaacaatgtgcgcattgacgcctttggcctgaaagcgcggctgacgggcgatctcaatgtcgttcaggacaaacaagggctgggtctgaacgggcagatcaacatccctgaagggcgcttccatgcctatggtcaggatctgattgtgcgtaaaggtgagttactgttctctggtccgccagatcaaccgtatcttaatattgaagctattcgtaacccggatgctacagaagacgacgtaatcgccggagttcgcgtcactggtctggcggacgaaccgaaagcggagatcttctctgacccggcgatgagccaacaagctgccttgtcttatttgctacgtggacaagggctggagagcgatcagagcgacagtgcggcaatgaccagcatgctgattggtttgggggttgcgcaaagtggccagattgtgggtaaaatcggcgagacgtttggcgtaagcaatttagcgctcgacacccagggagtaggcgactcctcccaggtagtggtcagcggctatgtattgccaggtctgcaagtgaaatacggcgtgggtatatttgactctatagcaacactcacgttacgttatcgcctgatgcctaagctatatctggaagccgtgtctggtgtagaccaggcactggatttgctctatcagttcgagttttaacaatgcgaatatttgtctacggcagtttacgccacaaacaaggcaacagtcactggatgaccaatgcccagttactgggcgatttcagtatcgataactaccagttgtatagcctgggccactatccaggcgcagttccggggaacggaacggtacacggtgaagtttatcgtattgacaacgccacgctggccgaacttgatgccttgcgcaccaggggcggtgaatacgcgcgccagttgattcagacgccgtacgggagtgcatggatgtacgtttatcaacgacccgtcgatggattaaagctaattgaaagcggcgactggttagacagggataagtaaccatatgcatacgccaccttcgggtggcgttgttttttgcgagacgactcgcattctgttttgtaattccctcaccttttgcttttctctccgagccgctttccatatctattaacgcataaaaaactctgctggcattcacaaatgcgcaggggtaaaacgtttcctgtagcaccgtgagttatactttgtataacttaaggaggtgcagatgcgtattaccataaaaagatgggggaacagtgcaggtatggtcattcccaatatcgtaatgaaagaacttaacttacagccggggcagagcgtggaggcgcaagtgagcaacaatcaactgattctgacacccatctccaggcgctacagccttgatgaactgctggcacagtgtgacatgaacgccgcggaacttagcgagcaggatgtctggggtaaatccacccctgcgggtgacgaaatatggtaaagaaaagtgaatttgaacggggagacattgtgctggttggctttgatccagcaagcggccatgaacagcaaggtgctggtcgacctgcgcttgtgctctccgttcaagcctttaatcaactgggaatgacgctggtggcccccattacgcagggcggaaattttgcccgttatgccggatttagcgttcctttacattgcgaagaaggcgatgtgcacggcgtggtgctggtgaatcaggtgcggatgatggatctacacgcccggctggcaaagcgtattggtctggctgcggatgaggtggtggaagaggcgttattacgcttgcaggcggtggtggaataaggtgtgtttatttatcgcgggcataaaaaaacccttactaaccgaagcccggcgttcagggttattacgccagaagaacttatttattctttgcgcgctcgaaggaggcaacgatttcagctttagcggcttctgcgttttcccaaccttcaactttcacccacttgcctttttcgaggtctttgtagtgctcgaagaagtgagcgatttgcgctttcagcagttcaggcagatcgttaacgtctttaatgtgatcgtattctttgctcagcttgctgtgcggaaccgcaaccagtttcgcatcttcaccggcttcgtcggtcattttcagaacgccaaccggacggcaacggatcacagaacccggctgcagcgggtacggagttgggaccagtacgtcaaccgggtcaccgtccagagacagggtgtggttgatgtaaccgtagttgcatggatagaacatcgcggtggacatgaagcggtcaacgaacagtgcgccgctctctttgtcgatttcgtatttgatcggatctgcgttagccgggatctcaataacaacgtagatgtcttccggcagatctttacccgcagggacgttgagtaagctcatgtctgtttcctttaaaaatatgtggcaaacaagtgccgagtattatagccaactcgcgccgaatgtcttcgcttgttttcgtcttcattttcctttttcaccagttttaagacggtatacagagcaggaaaatccataaccgtagccgcatttttcatagtgagatgaaagcgattacaaacttgtgattaacgttttatttacttttttgaagtgtgatgtaacgcaatctgttacataacgaattgtctatagttttttcgcgaacatcttttaaccaataataactaccccgacgaggacaaccctatgtggaaacgcttacttatagtctctgcagtcagcgcagccatgagctctatggcgttggccgctccattaaccgttggatttagccaggtcggaagcgaaagtggctggcgtgccgcagaaaccaatgtggcgaaaagtgaagccgaaaagcgcggaatcacgttgaaaattgccgatggtcagcaaaagcaggaaaaccagattaaagcggtacgttccttcgttgcacaaggggtggatgcgatctttatcgctccggtggtcgcgacaggttgggaaccggtattaaaagaggcgaaagatgccgaaatcccggtattcttgctcgatcgttccattgatgtgaaagacaaatctctctatatgaccaccgtcactgccgacaacatcctcgaaggcaagttgattggtgactggctggtaaaagaagtgaatggcaaaccatgcaacgtggtggagctgcagggcaccgttggggccagcgtcgccattgaccgtaagaaaggctttgccgaagccattaagaatgcgccaaatatcaaaatcatccgcagccagagtggtgacttcacccgcagtaaaggcaaagaagtcatggagagctttatcaaagcggaaaacaacggcaaaaacatctgcatggtttacgcccataacgacgacatggtgattggtgcaattcaggcaattaaagaagcgggcctgaaaccgggcaaagatatcctcacgggttccattgacggtgtaccggacatctacaaagcgatgatggatggcgaagcgaacgccagtgttgaactgacgccgaatatggcaggtcccgccttcgacgcgctggagaaatacaaaaaagacggcaccatgcctgaaaagctgacgttaaccaaatccaccctttacctgcctgataccgcaaaagaagaattagagaagaagaaaaatatggggtattgagggttgctatgcctgatgccgattcgtaggccggataaggcgctcgcgccgcatccggcgatggtgcactgaagcctgatgcgacgcttaccgcgtcttatcatgcctactgggagcacgctttacaccgggggaaaccatgacgaccgaccaacaccaggagatcctccgcaccgaaggattaagtaaatttttccccggcgtcaaagcgttagacaacgttgatttcagcctgcgccgtggcgaaatcatggcgctgctcggtgaaaacggggcgggaaaaagtacgctaatcaaagcattaactggtgtataccacgccgatcgcggcaccatctggctggaaggccaggctatcagtccgaaaaataccgcccacgcgcaacaactcggcattggcaccgtctatcaggaagtcaacctgctacccaatatgagcgtcgctgataatctatttataggccgcgaacccaaacgcttcggccttctacgccgcaaagagatggaaaagcgcgccaccgaactgatggcatcttacggtttctccctcgacgtgcgcgaaccgctcaaccgctttagtgtcgcgatgcagcaaatcgtcgctatttgtcgggctatcgatctctctgccaaagtgctgatcctcgatgaacccaccgccagtctcgacacccaggaagtggagttactgtttgacctgatgcgtcagttgcgcgatcgcggcgtcagcctgatttttgtcactcactttctcgatcaggtctatcaggtcagcgatcggatcaccgtcttacgcaacggcagtttcgtaggctgtcgggaaacgtgcgagctaccgcagatcgaactggtaaaaatgatgctggggcgcgagctggatacccacgcgctacagcgtgccgggcgaacattgttgagcgacaaacccgttgccgcgttcaaaaattacggcaaaaaaggaacgatcgcaccgtttgatctcgaagtacgccccggcgagatcgtcggtctggctggattgctgggaagtggacgtaccgaaaccgccgaagtgatcttcggtatcaaacctgctgacagcggcacggcgttgatcaaaggcaaaccgcaaaacctgcgaagcccacatcaggctagcgtactgggcattggcttctgcccggaagacaggaaaaccgatggcatcatcgctgccgccagcgtgcgggaaaatatcatcctcgctctccaggcccagcgcggctggctacgtcccatttcccgcaaagaacagcaagagattgccgaacgctttatccgccagcttggcattcgcacacctagtactgaacaaccgattgaatttctctccggcggcaatcagcaaaaagtgttgcttagtcgttggctactgacccgaccgcaatttctgatcctcgatgagccaacccgcggcattgatgttggtgcccacgccgagatcatccgcctgattgaaacgctatgcgccgatggtctggcgctgctggtgatctcctccgaactggaagagctggtgggctatgccgatcgggtgattatcatgcgcgatcgcaaacaggtggcggagatcccgctggcagagctttccgttccggcgatcatgaacgccattgcggcgtaaggagaacagtgtgatgcctcaatctcttccggacaccactacgccaaaaaggcgctttcgctggccgacggggatgccgcagctggtagcactattgctggtgctgctggtcgatagcctggtagccccgcatttctggcaggtggtgcttcaggatgggcgtttgttcggtagccccatagacattcttaaccgtgcagctcccgttgcgttactggcgattggcatgacgctggtgatcgccaccggtgggattgatctctccgtaggggcggtgatggctatcgccggagccacaacggctgcgatgacggtcgcgggattcagcctgccgattgttttgttaagcgccctgggcaccggcatcctggcgggattgtggaacggcatactggtagcgatcctcaaaattcagccgtttgtcgccactctgatcctgatggtcgccgggcgcggcgtggcgcaactgatcaccgccgggcagatcgtcacgtttaacagcccggatctcagttggttcggcagtggaagcctgttgttcctgccaacgccggtcattatcgcggtgctgacgcttatcctgttctggctgttgacccgcaaaacggcgctggggatgtttatcgaagccgttggtatcaacattcgggcggcaaaaaatgccggggtaaacacgcgaatcatcgtcatgctcacttatgtgttgagcgggctgtgtgcggcgattgcgggcattatcgtggcggcggatattcgcggtgccgatgccaacaacgctgggttatggctggagctggacgccattctcgcggtggtgattggcggcggaagcctgatgggcgggcgctttaacctgctacttagcgtggtgggggcgctgattattcaggggatgaacaccggaattttgcttagcggctttccgccagagatgaaccaggtggtgaaagcggtggtggtgctttgcgtgctgattgttcagagccaacgctttatcagtctgattaaaggagtacgtagccgtgataaaacgtaatttgccactgatgatcaccatcggcgtctttgtgttgggttatctttactgcctgacccagtttcccggttttgcttccacaagagtgatctgcaatatcctgaccgataatgcctttcttgggatcattgccgttggcatgacctttgtgatcctcagtggtgggatcgatctctccgtcggtagcgtgatcgcctttactggcgtgtttctggcaaaagtgattggcgatttcggcctcagcccgctgctggcgtttccgctagtgctggtgatgggctgtgccttcggcgcatttatggggcttctgatcgacgccctgaagatcccggcatttatcattacgcttgcggggatgttctttttgcgcggcgtcagctatctcgttagcgaagagagcattccgataaaccatcccatttatgacacgctcagtagccttgcgtggaaaatccctggcggcggtcgcttaagtgcgatgggactgctgatgttggcggtggtggttatcggcatattcctcgcgcatcgtacccgttttggtaatcaggtatacgccattggcggcaacgcaacgagcgcgaatctgatggggatttccactcgcagcaccactattcgcatttatatgctctccaccggactggcaacgctggcggggattgtcttcagcatttatacccaggccggatatgcgctggcgggcgtaggtgtggaactggatgctatcgccagtgtggtaattggcggtacgcttttgagcggtggcgttggaacggtattagggacgctttttggcgtggcgattcagggactgattcagacttacataaactttgatggcacgctgagttcctggtggacgaaaatcgccatcggtattttgttgtttatttttatagcattacagcgtggattaacggtgctgtgggagaatcgtcagagtagcccagtgacaagagtcaacattgcgcagcaataaaaacgcctctccgtgtggagaggcgcaggagattacgcgtccgggaactcacggataaagcgttcgacatcttcaaccatatggtcgttgccgacaaagaaactacggcgctggtgcagggtttccgggatgatatccagaatacgctctttgccatcgctcgctttaccgcccgcttgttccgccaggaatgccatcgggttgcactcatacagcaaacgcagtttgccgtccgggtggctggcggtgcttgggtagagataaataccgcctttcagcaggttacggtggaaatccgcgaccagactaccgatataacgactggtataagggcggttggtggatttatcttcttcctggcagaatttaatgtacttcttcaccccgttcggaaacttaatgtagtttccttcgttgatggagtaggttttgcctttctccgggaagcgcatccgttcctggcacaggcagaaaacgccgaggctaggatcgtaagtaaaggcgtgaacaccgcatccggtggtgtaaaccagcatggtagaggagccgtataccacgtaacctgccgcaacctgtttgttaccaggctggaggaaatcttcttccgttaccggcgtgccaacaggcgtaacgcggcggtagatggagaaaatggtaccgacagagacgttaacatcgatgttggagctgccatccagggggtccatcagcaccacgtattttgcgtgttcacagccttcaaagacgacaatctcatcttcttcttcagaggcaatgcccgcaacgatatcgcgtgctttcagtgcggctttcagtttttcattagcgaacaagtcgagtttctgctgaacctcgccctgcacgttctcagcaccgctggcacccaggatatcaaccagtcctgctttgttgatatcgcgatggataatcttggcgcccagttttattgcgctcagcaaagcagtgagctcaccggtagcatgagaaaactcgtgctgcttttcgacaataaattcacctaacgttttcataaaactttccctgcaatgtttatggagtaaagcgaccgcaacaatcttaacaaataatctcaatgttgcgctcaggtgaatcgcgccagcaaattacggattatcctgaaatgcgtttctcacttgcccgacatatgcgtaaaatgagcggcagattaaaaaaggatagtgacgtatgcgcattcatattttaggaatttgtggcacatttatgggcggtctggcgatgctggcgcgccagttaggccatgaagtaacgggtagcgacgccaatgtgtatccgccgatgagcaccttacttgagaagcaaggcattgagctgattcaggggtacgatgccagccagctcgagccgcagccggatctggtgattattggcaacgccatgacccgtggaaatccgtgtgtggaagcggtactggaaaaaaatatcccttatatgagtggtccacagtggctgcacgattttgtgctgcgcgaccgctgggtgctggccgttgccggtacacacggcaaaaccaccaccgcgggaatggcgacctggattctggaacagtgtggttacaaaccgggctttgtaatcggcggtgtgccggggaactttgaggttagcgctcatctgggcgaaagcgacttctttgttatcgaagcggatgagtatgactgcgccttcttcgacaaacgctctaaatttgttcattactgcccgcgtacgctgatcctcaacaaccttgagttcgatcacgccgatatctttgacgacctgaaagcgatccagaaacagttccaccatctggtgcgtatcgttccggggcagggccgtattatctggccggaaaatgacatcaacctgaaacagaccatggcgatgggctgctggagcgagcaggagctggtgggtgagcagggtcactggcaggcgaaaaagctgaccaccgatgcttccgaatgggaagttttgctggatggcgaaaaagtgggcgaagtgaaatggagcctggtaggcgaacataatatgcacaatggcctgatggcgattgcagcggctcgccatgttggtgtagcgccggcagatgccgctaacgcgctgggtagctttattaatgctcgtcgccgtctggagttgcgtggtgaagcgaatggcgtcacggtatatgacgattttgcccatcacccgacggcgattctggcaacgctggcggcgctgcgtggcaaagttggtggtacggcgcgcattattgctgtgctggagccgcgcagcaataccatgaaaatggggatctgcaaagacgatctggcacctagtttaggtcgtgccgatgaagtcttcctgctgcaaccggcgcatattccgtggcaggtggcagaagtggcagaagcctgcgttcagcctgcacactggagtggcgatgtggatacgctggcagatatggtggtgaaaaccgctcagcctggcgaccatattctggtgatgagcaacggcggttttggtgggatccatcagaaactgctggatgggctggcgaagaaggcggaagccgcgcagtaattcggccttagccagatatagtatgcgtaggccggataaggcgttcacgccgcatccggcatttgagcatagtgcctgatgcgacgcttgatgcgtcttatcaggcctacaggtgcaccgtatccggcaaaccatactcacatcaacaacgaaaattacccttcgttctccgctaactcgcgcagatactggaaaatctggcgtgcggatttcggcggcttattcccttctttctctttcttcgcgttgcggatcagagtacgcagttgctgacgatcggcatcgggccacagatttaatacctcagcgatggcgtcatcaccttgatcgatcagacgatcgcgcaggttttccagtttatggaacagcaccacctgctggttgtgacggtttttcagcttatccagcgcctgacgaataggctctacgtcgcgctggcgcagcatcttaccgatgagctgcaactggcggcggcgaccttccatcttaatacgctgggcgagctcaatagccgcgcgcagatccgcatctaacgggatcttatccagcgcgtttttccccagatcaacaatttccgcgccaaggcgttttagctcctcggcatcacgtttaatttcacttttactgacccagataatttcatcgtcttcgtcttcgatgtcatcaccgggaacgtcgtcgagccagtcttcgggctgcttagtcatctcaggctccttaaaaaaagaggctaatgttaccagttaagatgcgcactgaaaaacggttctctgttagacttcagagaaactctctacattatggcacttgcaatgaaagtaatctctcaagttgaagcgcagcgcaagattctggaagaagcagtttccactgcgctggagttggccagtggcaaaagcgacggtgcggaagttgccgtcagcaagaccaccggcattagcgtaagcacgcgttatggtgaagtggagaatgttgaattcaatagcgatggcgcgctggggatcactgtttatcaccagaaccgcaaaggtagcgcaagttccaccgatttaagcccgcaggccattgcccgtactgtacaggcggcgctggatattgcccgttataccagcccagatccctgtgccggcgtggcagacaaagagctgctggcctttgacgcaccagatctcgacttgttccaccctgcggaagtttccccggatgaagccattgaactggcggcccgcgcagaacaggcggcattgcaggcggacaaacgcatcaccaataccgaaggtggcagctttaacagccactacggtgtcaaagtttttggcaacagccacggcatgttgcagggttactgcagtacgcgtcatagcctctccagctgtgtaattgccgaagaaaatggcgatatggagcgtgattacgcctacaccattggtcgtgcgatgagcgatctgcaaacgccagagtgggttggggccgactgtgctcgccgtactttaagccgtctgagtccgcgtaaactctccaccatgaaagcgccagtcatttttgccaatgaagtggcaaccgggctttttgggcatctggtgggggcgatagcgggtggaagcgtttatcgtaaatctaccttcctgctggatagcctgggtaaacaaattctgccggactggctgaccattgaagagcatccgcatctgctgaaagggctggcgagcacgccattcgacagcgaaggtgtgcgcaccgagcgtcgcgatattattaaagatggcatcctgactcagtggctgctgaccagctacagcgcgcggaaactggggctgaaaagcaccggacatgcgggcggtattcacaactggcggattgccggacaaggtctaagcttcgagcagatgctcaaagagatgggcaccgggctggtggtgacggaattgatgggccagggcgtgagtgccattaccggtgattattcccgtggtgcagcgggcttctgggtagagaatggcgaaattcagtatccggtgagcgaaatcaccatcgcaggtaatttaaaagatatgtggcgcaatattgtcaccgtcggtaacgatattgaaacacgcagtaatatacagtgtggttctgtgctgttgccggagatgaaaatcgccggacagtaaaaaaactggcgcgacctgccgcgctataaactaaaaaattacacaaaatcattcgcactgcatcgagacggaaagtgaatgagggccggggagcgtactcgcagtacgtgacccggtcgaatgagcgtagtcgtcgatgaggcagtgtgaaggatgaagtgtaaataaaaaaggaactattcttgcagtctcctcgttggtattcagttcggcgtcatttgctgctgatctcgaagacaatatggaaaccctcaacgacaatttaaaagtggtcgaaaaagccgataacgcggcgcaagtcaaagacgcgttaacgaagatgcgcgccgcagcgctggatgcgcaaaaagcaacgccgccgaagctcgaagataaaagtccggacagcccggaaatgaaagatttccgccacggtttcgacattctggtcggtcagattgacgacgcgctgaagctggcaaatgaaggtaaagtaaaagaagcgcaggctgctgcagagcaactgaaaacgacccgcaatagttatcacaagaagtatcgttaattcctcatttccctgttgcctgcactcaggtaacagggaacttatcatcgcaaatgatgcaccacctgattgctgctgccgcgccagatcagggaagggtcttttaaatcctgcacaaatttgccgtcgaccagcacgttaatcaaatcaacaacctgcatttgcgcagcgttgagttcgtcgagtttatagcctgtccacacccagatgtctttacccggacactcggcgcggatgcgttgtaccagtttcagaatatccggcacgttttgcggatgcagcggatcgccgccggagagggaaataccctggcgtttgatacgagtgtcattcagatcgttaatgatctggtcttccattgctttggtaaatggctgaccggaatttacccgccatgtgcttttgttatagcaaccggggcattcatgaacacacccggagacaaacagggtgcaacgagtgccggggccgttgacgatgtcgacaggatagtactgatgataattcattatttcgcctggcttatcagtccgcgtgtaggctgcatccggtaatcaatgcctgatgcgacgctgtcgcgtcttatcagacctggagcaattgccaaatgtaggccggataaggcgtttacgccgcatccggcatttgcttagctcagagtgaagattaacctatctgcccattccccaaatgtttaacgcggcgcttaacttcttcctgcttaccagcgttaaacggacgtgcatccgggctacctaaatatccgcacacgcggcgagttacgctcacacgggaggcgtcatggttaccacatttcgggcaagtgaagcctttgctggtgcactcgaactcaccggtaaagccacactcgtagcactcatcaatcggtgtattggtgccgtaatacggtacatgctgatagctgtaatcccagacatcttccagcgccttcaggttgtgctgaatgtttggatactcgccgtagcaaatgaaaccaccgttcgccagcggcgggtaaggcgcttcaaagtcgatcttgtcgtacgggttcaccttcttctccacatcgaggtggaaactgttggtgtagtaacctttatcggtcacgcccggcaccacgccaaactcagcagtatcgagacggcagaagcgatcgcacaggttttcactcggcgtgctgtagagactgaaaccataacccgtttcttctttccactgatccactgcctgacgcagacgttcaacaatggcgatacctttcgcgcgaagctgctcgttgtcgtaaacatgctcgccgccgaacagcgcgttaatggtttcgtggatgccgatgtaacccaggctaatagacgcacgaccgtttttgaagatttcagaaacatcatcgtcagcattgagacgcacgccacaagcaccttccatatagaggatcggggccacgcgcgctttcacgccttcgagacgagcgatacgggtcatcagcgccttacgtgccagcaccagacgttcatccagcagcttccagaaggtggcttcatcgccttttgcttccagagcaatacgcggcaggttcaggctgatcacgccgaggttgttacgaccatcgtggatctgctcgccgttttcattttcccacacgccgaggaagctgcggcagcccatcggagttttaaagctaccggtgactttcactacctgatcgtagttcaggatatccggatacatgcgcttgcttgcgcactccagcgccagctgtttgatgtcgtagttcggatcgccttttttatggttcaggccatcgcgaatcgcaaacaccagtttcgggaacaccgcagttttacggtttttaccgaggcctgcgatacggttacgcaggatgctttcctgaatcaggcggctttcccagctggtgcccaggccaaaaccaaaggttacaaacggcgtctgaccgttggcggtgtgcagggtgtttacttcgtactccagactctggaaggcatcgtagcactctttgatggttcgagagttagcgtagccttcggcgtccgggatgttccactcttctgcggtcttgcgatgtttgttgtagctggcagtgacaaacggtgccagcacttcatcgatacggttaatggtggtgccgccataaatatggctggcaacctgagcaataatctgcgcagttaccgcggttgccgtagagatgctcttcggcggttcaatctcggcgttccccattttaaagccctgggtcagcatgcctttcaggtcgatcaacatgcagttgaacatcgggaagaacggactgtaatcgagatcgtgatagtgaatatcgccacgctcatgtgcctgcaccacgtcacgcggcagcaggtgctgacgtgcatagtgtttagccacgatcccggccagcaggtcgcgctgggttggaatcaccttgctgtctttgttggcgttttcgttgagtaagctggcgttggtctgctcgaccagaccacggatctcctggttcaggcgaccgcgtttttcacgttcaatgtcgcgatcgtgacggtactcgatgtaagcacgagccagttgtttgtatggaccactcatcagctgattttcaactgcggtctggatctcattgatatccacctggttgcggccctgcatctgctcgctgacaaccgcggcaacagtggcgcaataatcggcatcatcgacttccgctgctttagctgcacgcagaatcgcttctttgatgcgctcacttttaaacggcactttgcagccgtctcgtttcatcacatgcggtgtcatgatcgctccatatttttaagaacaggttatccacagaaattgggaaaggcgttttccggttttttcgtttcgttttccggtgctttccgcaatcgccatccgcttatccacaacgccgcacctttttcgtggggagctgtagtagcaattatagtcgattaatacaacatattgggttgggacgcattttaaagtctatatatagtgctttgcatcaaggatgtttgagctttttttgatgtagctcaaagtaaaaagcagagcgtacggatgacgggcgctacagcgatatgtaaattttttaatgaatttgctggttgaaaaatcaacaaaaacaacatactgacagacaaaaccccggaatgaccggcattaccggggcttagggaagatttacttctgtaaccaccagacagcctcaaaaggccgtaaattcatggcacagggttgtggactggcttcttcgtagttatgcatcacaagctgccagttgccgcgcatttgccctgcctgccagggttggatctcacggctaaggttggcaatgaccagcaaggtttgccccttccattcacggcgatagcaccacaatacagggctgtttggcagcagatcctggtaattgccccatgtcaggatggcttcctgcttacgcagtgcgattaacttttggtaggtgtaaaacacgctggaatcatcggccagcgcggcttctacgttgatttgttgatagttatcgcccaggccaatccacggttcgccagccgtaaacccggcattatcgccgttgctccattgcatgggcgtgcgactgttgtcacgggatttactggcgaggattgccaataactcgtcggcatcacgcccatcgttgcgcagctcggcaaacatattgaggctctctacgtcgcgatagtcagtaatgcgcgtgaaatgcgggttggtcatgccaatctcttcgccctggtagatatacggcgttccctgcatgccatgcagcaccatcgccagcatttttgccgcaggcacgcggtattcaccttcatcaccaaagcgagaaacaatgcgcggctgatcgtggttacaccagaacaaggcattccatgctacgttgtgcattccttgttgccagtggcggaacaatgttttcaacgccacaaagtcaggtttagccagcgtccatttttcaccaccgggataatcgaccttcaggtgatgaaaattaaaggtcatgctcaattcactgcctgtcagagccgcgtatcgctggcaatgctcaaggctggtggaggacatttcacctacggtcattaacccgcgtggcgtaaacacatcgcggttcatctcgtgcaaaaactcgtgtgctcgtggcccgtcggtgtagaagcgacgcccgtcgccgtccaggtcttcagggaaacgcgggtctttggagatcagattcaccacatccaggcgcaacccgtcgaccccacgatcggcccagaactcacagacttttttcagctctgcgcgtaccgctggattctcccagttgagatccgcctgttctggtgcaaagagatgcaaatagtactgttcgctttccgcatgccagcgccacgcactaccgccaaatttactacgccagttgttcggtggcgtttctggttctccatcgcgccagatataaaactggcggtaagggctttctttgttcagcgcctcgcgaaaccaggcatgttgggtagaggtatggttaaacaccatatcgagaatgatacgaatcccgcggctttttgcctgcgtcaccagttcgtcaaaatcgtccagcgtgccgtaggtgggatcaatcgccgtatagttcgctacgtcgtaaccgttatcgacctggggagagacataaaagggggttagccagatggcatcaacgcccagtttatgcagatagtccaggtgttggataacgccacgtaaatcgccggtaccgctacccgtggtgtcctgaaaactctttggataaatctggtagataacgccgttttgccaccagtggggaagatgagtcattacgttattcctgcgaatgcgagggggcgcaattgcgccccgaagaaaattaaacaatgtccagcgtgcccaggcggtatttccgctgatagataaagctggtgagtacaatcgggatgatgatggcgatagccattgccagcgcaaacacctgccagtagctcggttgaatgctgagaattcccggcaggccgcctacgccgatgccattcgccataacgccgttcaggccgcatagcaatcctgccagaccagaaccaatcatcgcgcacagcatcgggaagcgatatttcaggttgatgccgtacattgcaggctcagtgaccccaagccaggcggagatagcggcaggcacggagatctcgcgttcattgtgcttgcggctggaaatgataatgcctatcacggcggagccctgagcgatattgctcagcgcaatcagcggccacactggcgtaccacccatgctttgaatcatctgcaaatcaatagcaagcgtggtctggtgtacaccggtgatcaccagcggggcgtacaggaagccaaacaatgctgcgccaatcggagcaaagctgccggtcatcaggtgacgtaccgcaaaggcaacgccatcgccaatcatgcgaccaaacggaccaatcagcgcatgggcgaggaacaccgcgaggatcaggctacagacgggtaccaccaccagatagaggtaatccggcacgatgcgtttaaggcgagtttcaataacgcccagcgccagtccggctaacagtgccgggatcacctgcgcctgatagcctactttggcgatgctgaacatgccaaagtcccacacttccggcagctgctgcccgagcagataagcgttcatcagctgtggagaaaccagtgtcacgccaagcacgataccaaggatcggcgtgccgcccatttttttcaccgcactccagcaaataccgaccggcaggtagaagaagatcgcttcaccgatcaaccacagaaaatcgtagatcgtttgcagggaagggtacatttgcgccagcgtctgaccgttgctcatgggcaaatcgccgatcacattgcgaaaaccgaggatcaaaccgccgctaatcaacgcgggcagcaacgggaagaagatcaccgcgaaatgagagatcaactgctcatgccatttcatattatgccgggcggctttttttacctgctctttatcaacctgcgcctgtccggtactcgcaatcagtgcttgatagtaatcacccacgttggtgccaatcaccacctgaaattgcccggcattggtgaaacagcctttcaccatagggagttgctcaatttctttcggtctggcattggccggttggttgaggacaaagcgtaggcgagtaatacagtggctcaccgtcgcaatattgccgcgcccgccgaccagttcaatcaaccgatcgatatccgtttggtttattttgctcatcataaagccccatggcagatgacatttttggttggctgcagaatatattgcgcggaaaaatttaaaaacgggaacgttcccgaaacgcagcgaagatcacaatttatcgttcaggaaacgatcaggacagggtggcggggatgatgatttgttgcggttcgctgcgcccggttacctgcgcgatcaactggcaagccgcctggcgtccagcttcggcgtaaccgggatctacggttacgatctccggatggaggaatttcattaacggcgtattaccgacgctcgccagttgcaaggtgtcgatgcgttgctcttgcaggtatttacttgcgccaagtgccagcgtgtcggttgcgcacagtaaggcggtagtttcaggcgtaatcacttttgcaacgttctcatagccttgcttcatagcaagccctggcagggcggcaacgggatgcagtttatgcgctttgcagaacgccaggtaggcttcgtgacgtcgcttaccggttgtcacgtcactgtgcggcacgccgagataactgatattacgatgcccctggtcatacagccgttgcatcaggattttgattgccccttcgtcgtcataacagacgctagcaaagccttttgcgtcacgcgccagcagaaccaggctactctgccagtgggctaacatttcttctgttatgccagtaaaaccgaacagcactacgccgtcgatattacgccgtttcagcactcccaaatgttcggcaactaattgcggggaaaactgactttccatcatgattgggtcgtaaccttgttcatagaacgctggcagcatggtttgaacggcgagattttcactcaagctatccagacgggtaacaatgatggcgaccactttatcgctttgcccacgcatagcgcgcgcagagcgggaaggggaaaatccatgctgattcatcactgcttcaacacgctcgcgggtgagctggctcacgccgctttcgttattcagcacccgggaaactgtagatttccccacgccgcttaagcgcgcgatatctttgatggtcagccgattttgcatcctgttgtcctgtaacgtgttgtttaattatttgagcctaacgttacccgtgcattcagcaatgggtaaagtctggtttatcgttggtttagttgtcagcaggtattatatcgccatagatgctacgaatattattggattctccttattatttgcggcgcttttttcacttaccggaggttatatggaacctgatcccacgcctctccctcgacggagattaaaacttttccggtaagcccgtcttttcacggcgttaccggatgcgtaaggccgtgacgttttaacgtccctgctcagctttattaccttcaggtaaggcttcgccacgcctgaagacatttctgtactgtttcagacagtgcggagggactccttatgtttaaagaaatttttacccggctcattcgccatttaccttcccgtctggttcatcgtgatccattgcctggcgcgcagcagacagtgaatacggtggtcccgccgtccttaagtgcgcattgcctgaaaatggcggtgatgcccgaagaagaattgtggaaaacgttcgacacccatccggaagggttaaatcaggcggaagtggaatctgcccgcgaacaacatggtgaaaataaattacccgcacaacaaccgagcccgtggtgggtacatttatgggtctgctatcgcaacccctttaatattttactcaccattctcggcgctatttcttacgccacggaagatttatttgctgcgggcgttatcgcgctaatggtcgctatttctacgttgctgaactttattcaggaagcacgttccactaaagcggcagatgccctgaaagcgatggtcagcaatactgcgacggtgctgcgcgtaattaacgacaaaggcgaaaatggctggctggagatcccgatcgaccagctggtgcccggcgatattataaaactggcggcgggagatatgatcccggcagatttacgtatcttgcaggcgcgggatctgttcgtcgctcaggcgagcttaaccggtgagtctctgcccgtagaaaaagccgctaccactcgccagccggagcacagcaatccgctggagtgcgacacgctgtgttttatgggcaccaccgtggtgagcggcacggcacaagcaatggtgattgctacaggtgccaatacctggtttggtcaactggcggggcgtgttagtgagcaggaaagcgagccgaatgcctttcagcaagggatcagccgcgtcagtatgctgctgattcgctttatgctggtgatggcaccggtggtgctgttaatcaatggttacaccaaaggcgactggtgggaagcggcgctgtttgcgcttagcgtcgcggtaggcctaacgccggaaatgttgccgatgattgttaccagcacgctggcgcgcggcgcagtaaagctgagcaaacagaaagtgatcgtcaaacatctggatgctattcagaactttggcgcaatggatattctgtgcactgataaaaccggcaccctgacgcaggataaaattgtgctggagaatcataccgatatctccggtaaaaccagcgaacgcgtgctgcatagcgcgtggttgaacagtcattatcagaccggacttaaaaacctgctcgatacagcggtgctcgaaggtacggatgaagagagtgcgcgcagcctggccagtcgttggcaaaaaattgatgagattccgtttgatttcgagcgtcgccggatgagcgtggtagtggcagaaaataccgagcaccatcagctggtttgcaaaggtgcattgcaggaaatcctcaatgtgtgtagccaggtgcgtcacaatggcgagattgtgccgctcgatgacatcatgctgcgtaagattaagcgggttactgatacgctgaatcgtcaggggctgcgcgtggttgcggtggcgacgaaatacctgccagcgcgtgaaggagattaccagcgggcggatgaatccgacctgatcctcgaaggatatattgcttttcttgatccgccaaaagagacaaccgctccggcactgaaggcattaaaagcgagtggaattaccgtaaaaatccttactggcgacagtgagttagttgcagcgaaagtgtgccatgaagtggggctggacgcgggagaggtggtcattggtagtgatattgaaacgctatctgacgacgaactggcaaatcttgcacagcgtaccacgctgtttgcccgcctgacgccgatgcataaagaacgcattgtgaccttactgaagcgcgaagggcatgtggttggctttatgggcgatggtattaatgatgcgcccgccttacgcgctgcggatatcggcatttctgtggacggcgcggtagatattgcccgtgaagcggctgatatcatcctgctggaaaaaagcctgatggtgctggaagagggggttattgagggacgtcgcactttcgccaacatgctgaaatacatcaaaatgacggcgagctctaacttcggtaatgtgttcagcgtgctggtagcgagtgctttcttgcccttcctgccgatgttgccgttacacttgcttattcagaacctgctgtacgatgtgagtcaggtggcgatcccgtttgataacgtcgacgacgagcaaattcaaaagccgcagcgttggaatccggcggatctggggcgctttatgatcttcttcggaccgatcagcagcatcttcgatattttgacgttttgcctgatgtggtgggtattccatgccaacacgccggaaacgcaaacgctgttccagagcggatggtttgtggtgggcttactgagccaaacgctgattgtgcatatgatccgcacccgccgtgtgccgtttattcagagctgtgcaagctggccgttaatgatcatgaccgtgatcgtgatgattgtcgggatcgcattgccgtttagtccgctggccagttatctgcaattacaggcgctgccgttaagctatttcccgtggctggttgcgattctggcagggtatatgacattaacccagttggtgaaagggttctatagccgtcgttacggctggcaataaagaataaactgggcacgatagccccgattcagattgtagacaaagtgagttttgttcatgccggatgcggcgtaaatgccttatccggccaacaaattcaataaattgcaggaatcacgtaggcctgataagcgtagcgcatcaggcgattttgcgtttgtcatcagacttaatccgggcatgatagcccggatttccatcaagattagcgacgaacagcgatcgcttcgatctcaatcttcacgtctttcggcagacgggcaacttcaacgcaagaacgtgccgggaaggtggcgttgtgttcggtgaagaaggcttcgtaagtggcgtttacggttgcgaagtcgttcagatcttttacaaacacggtagttttaacgatgtcgcccactttcaggccagcggcttcgacgatcgcttttacgttatccaggctctgacgtgcctgtgcagcgacgtctgccggtacttcgcccgttttcggatttaccgggatctgaccggaggtgatgatcatattgcccagatcaacgccctgtacgtaaggaccgatagctgccggtgcattttccgtcgcgatagttttgctcatgatttctcctttattacagcggtaaaaagtctggctcattatagggagccagacttttattaccaaccgcaattaattggccagcaccacattatgggaaaactctttttcacagtatttgcatttgagcgcgatatcattggcgcgttttcgcacggcaaagctggaactaaccggttcggcatggctgatacagttgctgttcgggcagaccagcacattgtcgatgcgctccggcagacttgggcggcttttacccaccacttcatagttgtcgatacggttaaccgtggcttgcggcgcatacaatgccagttgatctacttgatcttcactcaaaaaggtattttcgattttgatcagatctttgcggcccatctcgccagaaggcaggttcagaccaatggtgatgcgctgatccgtttcggtcagcttgaacagactcaacagcttaaaaccgatctgggcggggatatggtcaattaccgtgccgcgtttaatagcttcaacctgcaatttattatcgtgtgtcatctctatttccccttacagtaccagatcgcgattcagaaccagtgccagtaacgcctggcgagcgaaaatcccgttgcctgcctgctggaagtaccaggcgtgtggcgttttatcaacatccgtcgcaatctcatcaacacgcggcagcggatgcagcactttcatattggctttggcgttgtggagatcgctggcgcgaagaacaaactgcgctttcacgttggcgtactcggacgggtccagacgctctttttgcacgcgggtcatgtacaggatgtctacttccgccatcacttcttcaatagagctgtgcagactccatgcgatccctttttcatcgagcatatccagaatgtattgcggcattgccagcgcgtccggcgcgatgaagtaaaaacggttgccgtcgaacttcgctaacgcctgagtcagggagtgaacggtgcggccatatttcaggtcaccaaccattgcgacgtggagattgtccagacgcccctgggtttcctgaatagtgaataagtccagcaaggtttgcgtcggatgttggttggagccatcaccggcattcagtaccggtacattgccggaaaactcggtggccaggcgcgccgcaccttcctgcggatgacgcatcactatcgcatcgacgtaagtgctgataacgctaatggtatcggccagcgtttcgccctttttacccagacttgtattggcgctgtcggagaagcccaccacgctggcccccaggcggtgcatagatgtttcgaaagagaggcgggtacgggtagaggcttcgaagaaacagctggcaatgactttgtgcttcaacagctctggttgcgggtttgctttcagtttcgccgctgtcgccagcaccagattaaggtcatcgcgactaaggtcgtttatggaaatgatatgtttctgatatagcggattagccatcttttatctcctgacgcctgggcaaaaaaaagcccctcgattgaggggctgggaatgggtgatcaacgggaagaaaaacggcaggccagcgtcttttttcagacgcggtaagacaaaatgtcgaacacactgaaccatacatcctcccggcaaattgtccggcattatactcatcgtcagaagcggcgcaagcatttgatgcaatattttgtcagcgcaaacggtttatttgaattaaaagtcaaggtatatgcatttttatttgatgtgattctgcaggggaactgtccttcggtatcaataattgcagacattccctgctttttcctttttcactttcacgcaatcagatatgcattttattccattcatccgacttatagggcggagtgtgaaagcgaacggctaacactattgcttactgctcagggatgcgcgctatcactttaatttcaaaatcaaagcctgccagccatgtaacacccaccgccgtccagtttggataaggtggggcgctaaatatttcatttttcaccgtcatgatgtcttcaaattggttttctggatcggtatggaagctcgtaacatcaatgatatcgtcaaaagtgcatcccgcagctgccagggtcgcatgcaaattatcaaatgccagtctgacttgttgctgaaaatcgggttctggtgttccgtcctctcgacttcctacttgcccggaaacaaacagcaaatcgccggaacgaatagccgcagaataacgatgctcagcatatagactatgtcggccagcagggaaaacagcggttctttctaccatttggttatcctcaagatttacgacatgaacagaagatttctctttaccgggagccgcttttagcggacgacgtgagtaaacaaaacccagacatcatggataatggctgggcttaattgagcgtagtcggttatgcgccaaacgcgccatcaatggtatgcatcgcgccggtaacaaaactggcttctggccctgctaaccatgcgaccataccagcgacctcttccggttgcccatgtcttttgatagccatcaaactatgcaacatatcgcgcattggcccgttggcgggattagcgtcggtatcaattggccctggctggacgacgttaatggtgatcccacgcggtccaaaatcacgggccagcccgcgcgccatgccttgcagggcagatttgctggcggcataagcagccatgcctgcaacaggcatacgatcgccattcacggagccgatgattaagatgcgcccgccttcgggcatctgccgggcggcttcaacagaggcatgataaggagcatgaatattgattttgaaaaggcgatcaatatcgtcggcatttaattccagggcctcgccaaagacgccaatacctgcatttaccaccaggatatccaatgcgccgctcttacgaacgacatcaatgacagcgtctctgtcagcactatctgtgaatactgctgtcgctccagtctcttgtgccaggcgtttagcggcatctttgctccccgcataggtgaatcgtacattggccccatcggtgacgaaacgacgtacgatagcggcaccgataccacgactgccaccgaggatgagaactgtcttacctgtaaaagcgcccataaggactccttgatttattatgtaacatgcattacaaaactgttttaactttctgtcaacaggttttgtaatggtcactaaaaaacaatctcgcgttccaggtcgtcccagacgtttcgctcctgagcaggcaatctctgcggcaaaagtgctttttcaccaaaaaggtttcgatgctgtcagtgttgctgaagttactgattatcttggtattaaccccccgagcctctacgcggcttttggcagtaaagctgggttatttagccgtgtactcaatgaatacgtcggtacggaagctattccgcttgccgatattcttcgtgatgatcgtccggtaggcgagtgcctggttgaggtattaaaagaagcggcgcgcagatatagccaaaacggcggctgcgctggctgtatggttcttgaaggtattcatagtcatgatccacaagcgcgtgatattgccgttcaatattatcacgccgcagaaacgaccatttatgactacatcgccaggcggcatccacaacgcgcacaatgtgtgactgattttatgagtaccgtgatgtctgggctttctgcgaaggcacgagaggggcactctatagaacaactctgtgcaacagctgcaatggcgggggaagcgataaaaactattcttgaggagtgatgcgggccttgacccgaaaggcgggaaagcgcctgccgataagttgtgataagacaataattcacgcgttaaggctagcggaattgattatcttttcgtataacgatagaaatgaaacgttgttttaattaaggagtggaaaagatgatcatcggaaatattcataatcttcagccgtggctaccccaggagttacgccaggcgattgagcatatcaaagcacacgttacggcagaaacgccaaagggcaagcacgatatcgaaggcaatcgactgttttatcttatcagcgaagatatgaccgagccgtacgaagctcgccgtgcggagtaccatgcccgctatcttgacattcagattgtgttaaaaggtcaggaaggcatgaccttcagcacgcaacctgcaggcgcgccggataccgactggttagctgataaagacatcgcatttttgccggaaggcgttgatgagaaaacagttattctaaatgaaggtgattttgttgtgttttatccgggggaagtgcataaaccgctgtgcgcagtgggcgcgccagcccaggttcgcaaagcagtagtgaagatgctgatggcgtgatgacttttcgccgtaaataactcaaggtttacggcgagtttgtgaaaagagcgttttttgatatttttttgtgagtaaaatttgtaatgcttagacgttcttattcactcaaggagttcgtcatgagcaaaataagtgatttaaattattctcaacacattacattagccgacaattttaaacaaaaaagtgaagttttaaatacctggcgtgttggaatgaatgattttgcccgtattgccggggggcaggataacagaaggaatattctttctcctggagcatttttagagtttttggcaaagatatttaccctgggttatgtggattttagcaaacgctccaacgaagcgggtagaaatatgatggctcatattaagtccagttcttattctaaagatactaatggcaatgaaaaaatgaagttttacatgaataatcctgtaggggaacgagcggatagtcccaaggtgattatagaaattagtctttccactatcactactatggggactcgtcaaggacatacagccattatatttccacaacctgatggtagcactaaccgttatgaagggaagtcctttgaaagaaaagatgagagtagtttacacctgattactaacaaggttctggcgtgttaccaaagtgaagctaacaagaaaatagcgcgtctattaaataataatcaggagttaaataatctacagaaattaaataatctacagaagttaaataatctactgaagttaaataatatacaggggttaaataatcctcaggagttaaataatccgcagaatttaaatgattctcaggagttaaataacagccaggaattaaatagtccacaggagttaaatgatccgcaggagttaaataattctcaggacttaaataactctaaggtgagttgtacagttagtgttgattctacgattacgggtttattaaaagaaccattgaataatgcattattagcaataaggaacgaacatctgctattaatgcctcatgtatgtgatgaaagcattagttacttactgggcgaaaaaggtatacttgaagaaatagataagctctacgcattaaatgatcacggaattgataatgacaaagtaggtaacaatgaaattaatgacatcaaagttaacctgtctcatattcttattgattccttagatgatgcaaaggttaaccttacaccggtcatcgatagcattctggagacttttagtaaatccccatatattaatgatgtaagaatactggattggtgttttaataaaagcatgcaatattttgatgatactaaaaagataaagcatgcatgctccgtaataaatcatattaatcttcgcagcgatcagtctaaaatagctgagacattatttttcaatctcgataaagaaccctataaaaatagccctgaattacaggggttgatttggaataagttggttgtatatgtcaatgaatttaacttaagtaatcgagaaaaaacaaatttaatacaaaggctatttgataatgttgagtctatatttaatgaagtacctgtcagcattttagtgaatgatatttttatgaatgatttctttatgaaaaatcctgagatgattaattggtacttccctcagttacttaagagttatgagggtgaaaagatttattttgataatttaaaatatgatttaaatgataatgataaggaatctaataaagaaattttgaagaatcaaccagataatgttatcaaagaaaaactgaataatgaatacaaacttagatttagaatgatgcaaactatcttgcaaagcagagttaatgtattaccatatattaatgaacagcgtttaaataaactaaatccaccggaaaatttacgtatagcaatagaacactttgggtggaagaatagacctatcactgcataaaataatgtgatgccgggatggtttgtatttcccggcatctttatagcgatagcaattatttactgagcgtcgcgaccatcaccgctttgatagtatgcatacggttttccgcctgatcaaaaacaatgctggcggcagattcgaagacctcatcagtgacttccataccgccatgtaggccaaattcttccgccattttcttgccaagcgtcgtttggtcgtcatgaaacgcgggcaggcagtggaggaatttgacctccgggttaccggtcaactgcatcatcttgctgttcacctgatattcacgcagcaatgcaatccgttccgcccatttctcttttgcttcccccatgctcacccacacatcggtatagataaagtcagcaccttcaactcccttcgcgacatcttcagtcagcgtaatattcccaccattttgctgtgccagggcgcggcattccgtaaccagcgcagcttccggccagcacgcttgtggcgcgaccagacgcaaatccagaccggtaagcgccgcagcttcgagcatgctattgcccatgttgttacgcgcgtcacctgcatagaccagcgtcatttcgttgaacgctttgccgggcaaatgctcctgcatggtgagaagatccgccagcagctgcgtgggatggaactcattggtcaggccattccataccggcacgctagcgtattccgccagtgtttcgacaatctcctgaccatagccgcgatactgaataccgtcatacatgcgaccaagcacgcgggcagtgtctttaatgctctctttatgaccaatctggctgccgcttgggccgagataagtaacgcgagcaccctggtcatatgcggcaacttcgaaagagcatcgggtacgagtgctgtctttttcgaagatgagcgcgatgtttttaccagtgagtttggcttcttctttaccgcttttcttatcggctttcagcttcgcggctaactgcagcaggctgttgagttcagctggcgtgaaatcgagtaatttcaggaaatgcttatgataaaacccggacatagatccctcctgtggctaacgcctcaatgaattaaaattcaatttatatggatgattattcatttgcaagtctaaagcataaatctttgtcacaaaggtggaggcaatgtcagtggtgtgtgacaataagagtatcggcaggacattaagaggaatgagccatggcaaacccggaacaactggaagaacagcgtgaagaaacacgtttgattattgaagaattactggaagatggcagcgatccggacgcgctgtacaccatcgaacaccatctttccgcagacgatctggaaaccctggaaaaagcagcagttgaagcgtttaaactcggttacgaagtgaccgatccagaagagctggaagttgaagatggtgatatcgtgatttgctgcgacatcctcagcgagtgcgcgttgaatgccgatctgatcgatgcccaggttgaacaactgatgacgctggcagagaaatttgacgttgagtacgacggatggggcacttactttgaagatcctaacggcgaagatggcgacgatgaagattttgtcgatgaagacgatgacggagttcgccactaattaagcgtagcgcatcaggcccaggtagttcctgcaacctggtgaatttgtagcccggataaggcattcatgtcacatccggcataaacaaaacgtacgttgttaatgttcgaatgcccgcgagttgaacacgcgggcatttttttagagttcgcgcaacatccgcacttcacaatcgacatggcccgtgcagccaagcgcatagtcgatatgctcaaagcccaaatgctcataaagcgcaatggcttcctttaaaaaagcggtcgtttccagatagcagcgtttgaaacccatctctcgcgcctgctccatcgccattaaggccagtttttttgccagccctttgccgcggatagccggaagaaaatacatcttttgcagttcgcaaatatcgctctcactcccggttaatggcgctatcccaccgccgccgaccacttcaccctcgtactcaacgacccaatatgcatggccaggctgactatatacttgatacagctcgtcaagattcggatcggcgacggtgtagcctttatcagcggtaagaccgtattcggcggatacctgacgaatgacgcgggcgatagcaggattatcctgcagcgtcaggcgacgcattacaggactttgcggcgcaatgttattcatagtttaacccaataaaaataaagtaattatacatttgtttaataccactctcttcttacgtacgcaagcgacttataaagtaataaagtttttgccagcctattactgataagagtattgtaacgtggcagaacattttactgtctgtatatataagttatatcaatggattttttaattcagggaatttttatggctcaagttattaatgaaatggatgttccgtcccatagctttgtttttcatggtacaggtgagagatattttcttatttgtgtggtgaatgtgttgttaacgattataacgctaggtatctatttaccatgggcattaatgaaatgtaagcgttatctttatgctaatatggaagttaacggacaacgattttcttatggaattaccggtgggaatgtttttgttagttgtcttttttttgtttttttctatttcgcaatcttaatgacagtgagtgcagatatgccgcttgttggttgtgttttgactttgttactgttggttttgcttatatttatggcagcaaaaggactgcgtcatcaggccttaatgaccagtctcaacggcgtaagatttagttttaattgctctatgaaagggttctggtgggtgacctttttcttgccgattttaatggccattgggatggggactgttttctttatcagcacaaagatgctacctgccaatagtagtagtagtgttattatatccatggttctgatggcaatagttggtattgtttccattggtatttttaatggtactttatatagtctggtaatgagttttctctggagtaataccagtttcggtatacatcgtttcaaggtgaaattagatactacgtattgtataaaatatgccattctcgcatttttagctttattgccttttctcgctgttgctggttatattatcttcgatcaaatattaaatgcgtatgatagttctgtatatgcaaatgatgacattgagaatttacagcaatttatggaaatgcaacgtaaaatgataatcgcgcagttaatctattattttgggattgctgttagcacaagttatttaacggtgtctttgcgaaaccattttatgagcaacctgagtctgaatgatgggcgtattcgttttcgcttaactttaacgtaccacggtatgctttatcgcatgtgtgcgttggtggtgatatccgggattacgggcggtctggcttatccactgctgaaaatatggatgattgactggcaggcaaaaaatacgtatttgctgggcgatttggatgaccttcctttaatcaataaagaagaacaaccagataaaggcttcttagccagtattagtcggggagttatgccttctttaccatttctgtaagagataaaaaaggccggagcatgctccggccttcgttttcatcactgtgttttgattacagcgcggcgataacagcctgctgttcaatcagtttcgctttcgcttccgcatagccttccagcttctcacgctctttcgcgatgaccgcttccggtgcgcgggcgacaaagccttcgttcgccagtttgttctcgatacggctgatttcaccttcaatcttcgccacttctttcgccagacgcgccagctcatcttctttgttgatgaggccagccatcgggatcagcagctctgcaccgtcgatgatcttcgtaacggaaaccggacctttgtcatcggcaggcagcacggtgatactttccagacgcgccagggtttgcaggaagccacggttttcatttacgcgacgttctgcatccgcgctgcaaccacgcagcagcagctccagcggtttgcccggcgcgatgttcatttctgcacggatgttacgtaccgcaacgatcgcctgtttcagccattcggtgtcggccagtgcggcttcatcaacctgagatgcatcgtactgcgggaacggctgcagcatgatggtgtcggcagtgataccgcaaagtactttcacacgctgccagatggtttcggtgatgaacggaatgatcggatgcgcgaggcgcagcagaccttccagtacagtcaccagcgtatggcgagtaccgcgcagttctgcttcggtgccaccgttcattaccggcttggtcagctcgagataccagtcacagaactggttccaggtgaactcatacagaatgcctgcggcgatatcgaagcggaagctgtccagcgcttcgcggtacgctttgatggtctggttgaactccgccagaatccagcggtccgccaggctcagcgtcatttcgccgccgttgaagccgcaatcctgaccttctgtgttcatcagcacaaagcggctggcgttccacagcttgttacagaagttacggtaaccttccagacgcttcatatcccagttgatgtcacgaccggtagacgccagcgccgccagggtgaagcgcagcgcgtcagtaccgtgcggctcaataccgttcgggaactgcttctcggtgcgcttacggattttgtccgccagctgcggctgcatcatattgccggtacgtttttccagcagttctggcaggctaataccgtcaaccatatccagtgggtcgataacgttacccttggatttggacatcttctggccttcgtcatcacgaatcaggccggtcatgtaaacggtgtggaacggcacctgcggtttgccattttcatctttgatgaagtgcatggtcatcatgatcatgcgggcaatccagaagaaaatgatgtcgaaaccagataccatcacgctggttgggtggaactgacgcagggcgtcggtattttccggccagccaagggtagagaaggtccacagcgcagaagagaaccaggtatcgagaacgtcttcgtcctgacgcaggacaacatcagcaccgaggttattttctttacgcacttcgtcttcgttgcggccaacataaacgttacccgcttcgtcataccatgccgggatacggtgaccccaccacaactgacgagagatacaccagtcctgaatatcgcgcatccaggagaagtacatgttttcgtactgcttcggtacgaactgaatgtcgccgttctcaaccgcttcaaccgccggtttcgccaggacatcggcacgcacgtaccactggtcggtcagcattggttcgataactacgccgccacggtcgccgtaaggaacggtcaggtcgtgcggtttaatttcttccagcaggccaagcgcgtcaactgcggcaacgactgctttacgtgcagcaaaacgctccagtttctggaactctgcagggatttcgctggaataaacgtcagattcgttacctttggtatcgaacacctgggcgctttcacggatatcgccgtcaaaggtcaggatgttgatcatcggcagggcgtgacgtttacccacttcatagtcgttaaagtcgtgcgccggagtgattttcacgcagccggtgcctttttccatgtcggcgtgttcgtcgccaacgatcggaatacgacggttaaccagcggcagaatgacatatttgccaatcagatctttgtaacgcggatcttccgggttaacggctacgccagtatcgcccagcagggtttctggacgggtagtcgcgaccaccagataatctttaccgtctgcggttttcgcaccgtcagccagcggatagcggatgtgccacatgctacctttgctttcgcggttttcgacttccaggtcagagatagcggtgcgcagtttcggatcccagtttaccaggcgtttgccacggtaaatcaggtcttctttatacagacgaacgaaaacttctttcaccgcattggacaggccttcgtccatggtgaagcgttcacgctcccagtcgacggagttgccgagacggcgcatctgacgggtaatggtgccgccagattccgctttccattcccagattttgtcgatgaaagcttcgcggccgtagtcgtgacgggttttaccttcttctgcggcaatcttgcgctcaacgaccatctgggtagcgatcccggcgtggtcagtaccgacctgccacagggtgtttttgccctgcatgcgctgatagcggatcatggtatccatgatggtttgctggaaggcgtgacccatatgcaaactgccggtgacgttcggcggcgggatcatgatgcagaaactttcctggctttcatcgccattaggcttaaagtagccctgcttttcccagtgctcgtaaagcggctgttcgatatcttgtgggttatatgtcttttccattatttccaggttgccgtattcaggttgaaaccagccacgcggtaggctttatagcgttcgcgcgccagttgtttcagagaatcttcataaggaacgaagtctaccacttctgtgaaagcggtggcaaaatctgcaaagcttgttcgcagactaatcaatatatcgcgccggctgctgctacgcttttgcggccaggcgatctccaccggtgcaccgccgcgcggtccttctcccgctaaattatgcggaacaaagctttctgccggacgcgcccacagggcttcatccagccggtaagcctgcttttcatcttcacaggcgatgagcacgcgcttaccgctgcgccaacgttctgcggcaatttcacacaccagttgctcaacggcgcttaagccatcgacggtggtgtcattgtccagaaggtagaacgtcgcgtttttcataaatggggcttcttgtggtggatttaaatacgcatcaggtatacaccgcagcgcctgatgcgacgctgttgtgtcttatcaggcctacgagttcagtgctgtgtaggtcggataaggcgttcacgccgcatccggcaataacagccttgcctgacgcaattactcttcgccgttaaacccagcgcggtttaacaggaactgtgccagcaacgctaccggacgaccggtggcgccttttgctttaccagaacgccaggcggtaccggcgatatccaggtgcgcccagttgtacttacgggtaaagcgactcaggaagcaacctgcggtaatcgccccaccaggacgaccgccaatgttcgccatatcggcaaaattggactccagttgttcctgatactcgtcacccagcggtaagcgccatgcgcggtcaccggattgttcagacgcggcaatcagttcatgggccagcggattatggttcgccatcagaccagtaatatgatgacccagcgcgatcacgcaggcaccggtcagcgtcgccacgtcaatcaccgcttccggctcaaaacgctcaacgtaagttaacacgtcgcacagtaccaggcggccttcagcgtcggtgttcagcacttcaacggtttgaccggacatggtggttaacacatcgcccggacgataggctcgtccgccaggcatgttttcgcagcctgccaacacgccgataacgttaatcggcagttgtagctccgcgaccatccgcatcacgccgtaaaccgctgccgcaccgcacatatcgtacttcatctcatccatgccttcactaggcttgatgctgataccgccggagtcgaaggttaaacctttacccaccagcacgattgggcgtgcatcttcgctcgcgttgcctttgtactcaatcacgctcatcaggctttcgttttggctaccctgaccgaccgccagataggaatgcatccccagctctttcatctgctgttcgccgataacgcgggtgatgacattcttgctgtagctgtcagccagctggcgcgcttgactagcgaggtaagcggcgttacagatattcggcggcatattgccgagatcttttgctgctttaatcccggcggcaatcgccagaccgtgctggatcgcgcgctcaccgctggtcagttcacggcgggtcggcacgttgaacaccatcttacgcagcggacgacgcggttcgctcttgttcgttttcagctgatcgaaactgtagagcgtctcttttgccgtctcgacagcctgacgcactttccagtagttgttacggcctttaacgtgcagctcagtcagaaagcagaccgcttccatactgccagtatcattcagcgtattaatggttttctgaataacctgcttgtactgacgctcatccagctcacgttctttgccgcaaccaataaggagaattcgctcggaaagtacattcggaacatggtgcagcaacaatgtctgccccggttttccttccagttcgccccgacgtagcagggcgctgatgtacccatcgctgattttatcgagctgttctgcaatcggagaaaggcgacgtggttcgaagacgcccacgacgatgcaggaactccgctgtttctccgggctaccgctttttacactaaactccatgcactacgctcctgaatcttaaagacaacggcggtggctacagatagaattgcaagctttcgtaactcatgtccgctgttgcgatgacttcgtgttaatcttaacgttattacggcattggcacgtcagaacaaaatctgagaggtgaatccgttgagtataattatcttagcgacgatttcgacgactcaagagaataaatgacgtttaagccatgaaacaagctaaaatcctgcaaaagacgagtttttacgggcgtatttaaagtgataatcataagatatctggtgcgggagacgctcaaaagccagctggcgatactcttcatcttgcttttgatcttcttctgtcaaaagttagtgaggatcctcggcgcagcggttgacggcgatattccggcgaatctggtgctctcccttctcgggttgggcgtgccggaaatggcgcagcttatcctgccattaagcctgttcctcgggctgctgatgacgctgggcaaactgtataccgaaagtgaaattacggtaatgcatgcctgcggcctgagcaaagcggttctggtgaaagcggcaatgatccttgcggtattcacggcaatcgtagcggcggttaacgtgatgtgggcgggaccgtggagtagccgtcatcaggatgaagtgttagcagaagcgaaagcgaaccctggcatggcggcgctggcgcaagggcaattccagcaagcgactaatggcagcagcgtgctgttcatcgaaagcgttgacggcagcgatttcaaagatgtgttcctcgcgcaaattcgaccaaaaggtaatgcacgtccttctgtggtggtggccgattccggacatttaacccagctgcgcgacggctcccaggtcgtcactctcaaccagggaacgcgcttcgaaggcactgcattgttacgtgatttccgcattacggacttccaggattatcaggcgatcattggtcaccaggcggtggcgctcgacccgaacgataccgaccagatggacatgcgcacattgtggaacactgacaccgatcgtgctcgcgcagaactgaactggcgtatcacgttggtattcaccgtgtttatgatggcacttatggtcgtaccgctgagcgtggttaacccacgtcagggacgcgtactgagcatgctgccagccatgctgctgtatctacttttcttcctgatccagacctccctgaaaagcaacggcggtaaaggtaagctggacccgacgctgtggatgtggaccgttaacctgatttatctggctttagcgattgttctcaacctttgggacaccgtgccggtccgccgcctgcgcgccagttttagccgtaaaggagcggtgtgatgcaaccttttggcgtacttgaccgctatatcggtaaaactattttcaccaccatcatgatgacactgttcatgctggtgagcctgagcggcattatcaagtttgtcgatcagctgaaaaaagccgggcaggggagttacgacgcgttaggcgcaggaatgtataccttgctgagcgtgccgaaagatgtgcagatcttcttcccgatggcggctctgcttggggcgttgcttggtcttgggatgctggcgcagcgcagcgaactggtggtgatgcaggcttctggttttacccgtatgcaggtggcgctgagcgtgatgaaaaccgccattccgctggtcttgctgacgatggcgattggcgaatgggtcgcgccgcagggcgagcagatggcgcgtaactaccgtgcgcaggcgatgtacggcggcagcttgctctctacccagcaaggcttatgggcgaaagatggcaacaacttcgtctacattgagcgggttaaaggtgacgaagagttaggtggcatcagcatttatgcctttaacgagaatcgtcgtctgcaatccgtacgctatgccgctactgcgaagtttgacccggaacataaagtctggcgtctgagccaggttgatgaatctgatctgaccaatccgaaacagattaccggtagccagacggtgagcggcacctggaaaaccaacctcacgccggacaaactgggcgtggtggcgctggacccggatgcactctctatcagcggtttgcacaactatgtgaagtatctgaagagcagcggtcaggatgccggacgttatcagctcaacatgtggagcaaaatcttccagccgctatctgtggcggtgatgatgctgatggcgctgagcttcatctttggcccactgcgtagcgtaccgatgggcgtgcgtgtggtcaccggtatcagtttcggttttgtcttctacgtactggaccagatcttcggcccgctgacgttggtttatggcatcccgccgatcatcggcgcactgttgccaagcgccagcttcttcttaatcagcctgtggctgttaatgagaaaaagctaaccgaatgaacgaataaagggagcgaaagctccctttattattgttagcaaagtgtgcttcgttcattcctgaaaaataattaaaattcaatatattgcagtggggtgggcatgataagacgcgccagcgtcgcatcaggcaaagacaaatctcgcctgacttaccttcttctcccccccagcaaactccccaacatcccgcgtacaatctgattcgtcacttggcgagcggcgcttttggccattgtttgcaccacaccatctttcttcccgccgcgtggtccggtagtgccgaacaaaatatccttcaatccaccaagaatgccgtcatccaccgctacctctttccctttcgcgggaggattattttgctgctcggtactggcctgaaagcctttttgcaacatctcataggcggattcccggtccacctcatcctcatatttgccatacaccggagagtgattaatcaagccattacgctcatcttccgtcaccggccccatccggctacaaggcgcgatcaccatcgcacgctccaccacagaagggcttcctttcgcatccagaaaagagatcaacgcctcgccggtgcccagttcctgaatcgccttttcggtatcaaacgccggattggcccgcatggtttgcgccgctgccttcactgctttctgatcttttggcgtaaaagcccgcaaagcatgttgaacgcgattaccgagctgcccgagcacattatccggaatatcagacgggttttggctaacgaaccagacgcccacgcctttactgcgaataagccttatcacctgctcaatcttatccagcagtacctgcggggcatcgttaaacagcagatgtgcctcgtcgaagaaaaacaccagttttggtttctccagatcgcccgcttccggcaattgttcatacaactcactaagcatccacagcaggctggcggcgtacagtttcggcatctgataaagtttctcggcgctgaggatattgataacgcctttaccgttggcatcggtgcgcatccagtctttgatatccagcatcggctcaccaaagaagtgtgctgcgccttgctgttccaggctcaacagcccgcgctggatggcaccaacgcttgcgctactgatattaccgtactgattctggaaggatttggcgttatcgccgatgtactgggtaattgcccgcagatctttaaagtcgagcagtaacagcccctgatcgtcagcaatgcggaagatgatattcagcacgccagattgcacatcgttgagattcaacagtcgtgccagcaacagcggccccagatcgctaaccgtcgcccgcaccggatggcctttctcgccaaagatatcccacaccaccaccggattggcatgcggttgccagtcattgacgccgatatttttaagccttgcgagcagtttttcgctcaccgttcctgcctgcgcgacgccggtcagatcgcctttcacatcagccataaacaccggcacgccgatttcgctcaaactctccgccagtttttgcagcgtaacggttttacccgtccccgttgcgccggtaatcagcccatgacggttagccattcccggcagtaaaaacagttctgtgtccggcgtgcgggcaattaacaggggttcactcatgagatatcctccagtttcctgcctggagtataggcaacgtccggcaaagagaatacgtgtaatgaagagaaaataacttaaagcgtgttgccgtgataaatctgatacccgaggtcaacagtgttgtggttgtgatcgttatttttaattttgctcagcaacatttgggcggccatccgaccaatatcaaaacggggagtaattacgctggcgaggcttgggatcatttgcctgccaatctccagcccatgaaaacccgcaatggaaatttgttctggcacggcgaggtttcgctcgcggcacagcagaagcgcacccatcgcaatatcgtcattggtgcaaaatacaccgtctaaatccgggtttgcgctaagggcatcacgcattaactgcattcctaaatgaatggaactgatggcgcgtggattcatgcgtaatggggaaagattatgcagcatcatcgcatcgcaatacccctgataacgctgttcatcgcgggtgtcatctttggaaccgagatacagaattttgtgcctgactcgcttctccagcatggtacacaccatgtcaaaagcggcctgccgattatcaaaaccgacctccatatccagccgttctccctgtacatccatcaattccacgaccggaatggtggcactacgcagaaatttcaccgtcctgatggtgtgatatttttcgctaagtataatcccgtcaatgttataagagagcaggttaatcacgctctcttcttcggaatcgcgatcgtaattgtaattagcaataagggtctgataattatgctcagaggtgacggattctattcccgcgagaatgtcagcgaagagttgattttgaaaactcggaatcaagataccgagggtataactttgtgcattcaacaacatgccgggagcgcgattagggatataattgatctcttccataattttggcgatgcgctcgcctgtttcctttgccacctttttcgggctgcggatataacgactcacggtcatttttgttacgccagccagcgtagcgatatcctgtaaagaaattctgtgattgcgcataacttctcccaacgtcgggggaatcttcaatcttcccccgaaactacatcacaatattttattctttcagtgcaatacggcgttaatggctaacacgcccagcaaacccataatagaaataagggtttccatcaccgtccaggtacgcaacgtttcaccaaccgtcagattaaaataccctttaaatagccagaagccagggtcgtttacgtgactcgcgatcacgctgcccgcaccggttgccagtaccattaaagcgggatcggcatgggtaacgttgataatcggcaacaccacacccgcggtggtaatggccgcgacggtggcagagcccagagcgatacgcaacagcgccgcaacagtccagcacatcaataacgggctaagtgtagttccggtcattaagtgactaatatagtgcccgacaccgctatctactaatacctgcttaaacgcgccgccgccagcgataataaacacaatcatcgcgatagcgcctatagaatccccaatgatatccatgatttgctcgatggtgcgtccattacgtcggcccagtgtgaaaatcgcaataacaatggcaataaacagcgcaacggcagggttaccgacaaattcaaagaagaggcgcacggtgttagttttcggtaacgtaatttcacaaacggcggcgatagccatcaggatgaccgggatcacggcagcgaaaatactgttccagaaggagggcatctcctcttcgctaaacagatgaggattaaataagccttccggtggtgctttctcaaagcgagttagcagtttagaaaacagcggtcctgcgacaataactgtcggaatggtaatgataaatccatacagtaaagtcgttccgagattagcctcaaagatagtcgcgatggcagtaggccctggatgtggcggcagaaaacagtgggttacagagagcgctgctaccattggtacgccaacatacaacaggggtaatccactacttgctacgatggtaaataccaacggcaacagcaggacaaaacccacttcaaaaaacatggcgaggcccacaaccagaccggtgatcactagcgcccattgcacgcgttttttaccaaaagtagcaatcagcgtagtggcgatacgttgtgccgcacccgtatcagaaatcagcttgcctaacatggccccgaaaccgaggatcattgccagcccgccgagcgtgctgccgataccattttgtatagagtgcaggacggcctgtgcatccatcccttcggcaaatccgacgacggcagctaccagaacgagggcaataaagccgttaactttaaagccgatcatcaggataagaagcagcgcgacgcctgccgcaataatgattaatggcatagtctttatctcttattagtgccagaaaagcagcgctttcgcgctgcacgtaggggggctgttaaacagccactaacatgccgccatcaacaaacaacaggtggccgtttacgaaatcagaggctttactagaaaggaacaccgcagcaccaatcagttcctgcggatctccccagcgtgcggcgggggtccgtttgcacaaccaggcggtgaaggcttcgtcctcaaccagtgctttagtcatttctgttttgaaatagcccggcgcaataccgttgacctgaatattgtggcgcgccagctcgacgcacatgccgcgggtgagcatttttaccgcccctttgcttgcggcataaggggtgatggtgtcacgtcccagttcgctttgcatgctgcaaatattaataactttacctgccttgcgttcaaccatgtgacgagttaccgcttggcttaccaggaacacggcggtctggtttactgcgatcacatcattccactcttgttcagggaactcagtaaaaggatgacggcgctggataccggcgttattcaccagcacatcaatggggccgatgtccttttcgatatgttcaacggcggcatcaatttcatgtttatgagtaacattaaaaggtgcggcaacggcctgaataccctcctggtggagtttttctacagcaagttctgcgcgttcggcagtaatatcattaataattatttgtgcgccatatttacccaggccggttgccagtaaaaagccaatgccctgtgcactaccggtaatcaagatattttttcctgccagactaaatagatcgttcattgtattattcctttatttatctcttagaaaacaagctggacttttgctgcctgggttttatcaccggcgaaacgtagcgcctcttccaggtcagtgaagggatattcagcactcagtaaaggcagtggattgataacgccattcgccagccaactcactgcggtattaaattcgctggtaaaacggaaagagcctctgagactaatctccttaccaatcaacgtcatcattgggaattctgccatcgcgcctcccatacctacctgcaccattacgccgcgtgcacgagtgacctccagacaggtattcacactactaggatgaccggacacttcaaagctgacatcgaaatagcctttttccgctttccagtgatccatgtcgtcgttttgtgggtttacgagcacatccgcccccatctctttgcccaggctaagggaacggggactcacatcagcacagacaatttccgcggcccccagtgttttcactgcactgacaatcaggcagccaatgggtccaacaccggaaataaatactcgcttgccctgtaactcgccggcctgatgtgcggcatgaatcgcgacggctaaaggttcggcaaaagccataaccttttcgtcagctttggccggataagggacacattggctcgtttcgaccattttataacgggtaaaaccaccatcaacatgagggaaatacatggcactgccaaaaaaacgcatatctgtacactgattctcgttatgttcaatgcagtatttgcagtgaccgcacggtttagacggattaatggctaccgtttgcccttcatgtaattcactactgtcgctatgaataactttaccgataacttcatgacctaacaccatcggtgcctttatcatgaaattacctacttttccttcctgataataatgtaaatcggaaccgcaaattccacctcgggttatttgtactaatgttccattattattccaatctatcgtctgctcggtaacggcaacagttttcttgcccgcaacaacgcaggactgtgttttcacttgcataaattcctcactggtcaggtagacacctcggaagcatttaagcggttttaactgtcattatttgtgatgaagatcacgtcagaaaattgttacattactatgttacgcataacgtgatgtgccttgtaattcttatcagtagaaataaaaaaacgtgaaattattatgccgccaggcgtagtatcgcagcaggtaagatgattcaggagattttaaatggcgggtgaaagctttattttgatgggcgttagtgggagtggtaaaacattaattggtagcaaggttgccgcgttattatctgctaaatttattgatggtgacgatcttcatccagccaaaaatatagataaaatgagccagggtattccattatctgatgaagatcgacttccctggctggaacgcttaaatgatgctagttacagtctttataaaaagaatgaaacaggatttattgtctgtagtagtttaaaaaaacagtatcgtgatattttacgcaagggtagcccccatgttcatttcctctggttagatggcgactatgaaactattctcgcgcgaatgcagcgtcgggctgggcattttatgccggtagcgttactaaaaagtcagtttgaggcactggagcgtccacaagcagatgaacaggatattgtgcgcattgatatcaaccatgatattgccaatgtcaccgaacaatgtcggcaggctgtgctggcgatacgacaaaacagaatatgtgcgaaagagggcagcgccagtgatcagcgctgcgaatgattttcaaaaatcggctttcaacaccacgcggtaacgcgccttaccgtcgcgcacatgctggatggcgtcgttaattttgctcatcgggaacagttcggtggtcggcgcaaccttgctgcgggcggcaaaacgcatcagcttacgcagctcataaggcgtgccggtagcagaaccagagacgctgcgatcgcccgcaattaacgtaaaggccggaacagacagcggcgtgagaaccgcaccgaccgtatggaaattaccgccataggtcagcgcctcaaaatagggctgccagtcgaggctgacgttgacggtgttgataatgagatcaaactgccccgccagtgctttcagtgcctgcggatcgcggctattcaccactttatcggcacccatcgccagcacttcctgctctttcgccggattagaactaaaggctgtcacctcgcatcccattgcgtgcagaagttttatagcgatatgccccagcccgccaataccaattaccccaacgcggctggtagcagtgatatggtgcatcaacagtggtttaaagaccgtgataccgccgcacaacagcggcccggcggactcgatatcaatattttctggcagtggaatcacccattgccagtccgcacgcaacttctcggcaaagccaccgcgattcataatcgtcggcaccgcaccttgctcgcagttgatctgattaccgctaatacaggcgtcgcagtgaccacagctacgcgccgtccagccaatcccgacacgctgaccgacctgcaaacctttatcctgcgcggcgctcccgagtgccaccacgcgcccaatcacctcatgcccggcaaccagcggatattgactaaatccccattcgttatcgatcatgctcagatcggaatggcagatcccgcagtaatccacctgcacttcaacatcttgtggcctcagctcaccgggatcgtactcataaacttccagttcgccgcccgcttcttttgcggcatagctttttatcatgctcattttttggtccttctctggtgttgtttgggaagtgtagagcatggcagggcggggtgcctggagtgtgacaaaggttacacatcgctgtatgcaatgctgaaaatttcagcacttagcgaggtgcgagcaagctggcgcttgcatggtggcgtgcgacaggtataatccacaacgttttccgcatacctcttcagtgccgaagtggcgaaatcggtagacgcagttgattcaaaatcaaccgtagaaatacgtgccggttcgagtccggccttcggcaccaaaagtatgtaaatagacctcaactgaggtctttttttatgcctgaaatccagtgtttatctatctttcccgctatattaactctctcaaggtcaaccgatatcaacgtacatctaccaacatatgttggtacagatgatggtatttccggttcgataatgcttgtaccaacagggagggaatacgagaaatcacaggacattgctaatgctggtacgcaatattacctgaagctaaaaacctgcacgttagccctttgtaggccagataagacgcgtcagcgtcgcatctggcataaacaaagcgcactttgctggtctgttcccctcaccctaaccctctccccggaggggcgaggggactgtccgggcacatttttagactttgtcatcagtctgagcctgccattggcaggctctggtgtccttttacgctaccatgctaataatcagcacaataatcagcccaaccacggagttgaccagctccagcagaccccaggttttcaacgtgtcttttacactcaggtcaaagtaacctttgaacaaccagaaagatgcatcgttaatgtgggtgagggtgttggaacccgcagccgtcgccagtaccagcagcgccggattcacgccaaccagctgaccagttgctggatctaggattgcagcactgataatcccggcggcggtcatcgcgctaacgacaccctgacccgtcgccagacgaattagcacagtgatcagccatgccatgatgtaggggctgatattgccgtgggacatcaacatgccgatggtgtcgccaatgccggtgtcgatgatggtctgcttcagcacgccacccgcaccgatgatcagaatcaccattgcaatactcttcaccgcgctttcaaaagcgttcatcacccactgcatgtcatgaccacgtgcggtgccaaagagtacgaatgcaaccaccatcgcaataaacattgcaatcgggctggaaccgataaagttaaccacttcccaggcaggggtatcttttaccagccagatattggcgatggtggtagagatcataatgatcgccgggatcagcggcaccagaatgctaacgccgaaagagggcagattattcatatctaccggttgatctgctttcaggaaacttggcgttgggcgctcaagattgccgaggaacttcggcaggatcagacctgcgcagattacacttgggatcgtcaccagtacgccatagatataaaccatccccatatccgcgccataagcattcaccagcgccaccggacccggctgcggtgggaacagactatgtgcggtagtggcagctgctactgccgggatcgccagtttcaggaacggaattttagcttcggcggcaataacaataaccagcggcgctaacatgataaaggccacttcatagaacatcgccagaccaaaaatcaggccgatgataatcacgctcagctgtacatagcgcagaccgagacgcgccagcagcgtatgcgctatctggtgagccgcgccggagtcgaccatcaatttaccgatgaccgcaccgaacaccacgatgatagccagttcccccagcgtgttgccgaagcccgctttcatagtgtgcagcaggctcatcaaatccatgcccgccagcatcccgacggacagcgccgccaccaacaaagccaccatactattgattttgaacttcaaattcagtaccagcatcagaccaatgccgaataccacccagagaatgttaagcacatgcataacgttttaccttacctggttgaaccgttgttattttgggcgatatgttatgtaaattggtcaaccattgttgcgatgaatgtcacatcctctgatcaataaccatcgattaccctttgctgcaatttgcagcaacaaccatgagagtgaaattcttgtgatgtggttaaccaatttcagaattcgggttgacatgtcttaccaaaaggtagaacttatacgccatctcatccgatgcaacgccacggctgcggtctggttgttcatccggatacctaaacaactccagggttccgcgtctctttgctgtggaacccactatgtgaaagaggaaaaatcatggaacagacctggcgctggtacggcccaaacgatccggtttctttagctgatgtccgtcaggcgggcgcaactggcgtggttaccgcgctgcaccatatcccgaacggcgaagtatggtccgttgaagagatcctcaaacgcaaggcgatcattgaagacgcaggcctggtgtggtctgtcgtagaaagcgtgccaattcacgaagatatcaaaacccacactggcaactatgagcagtggatcgctaactatcagcagactctgcgcaacctggcgcagtgtggcattcgcaccgtgtgctacaacttcatgccggtgctcgactggacccgtactgacctcgaatacgtgctgccagacggctccaaagctctgcgcttcgaccagatcgaattcgctgcattcgaaatgcatatcctgaaacgcccaggcgcggaagcggattacaccgaagaagaaattgctcaggcagctgaacgcttcgccactatgagcgatgaagacaaagcgcgtctgacccgtaacatcattgctggtcttccgggcgcggaagaaggctacaccctcgaccagttccgtaaacacctggagctgtacaaagatatcgacaaagcgaagctgcgcgaaaactttgccgtcttcctgaaagcgattattccagttgctgaagaagtcggcgtgcgtatggctgttcacccggacgatccgccgcgcccgatcctcggcctgccgcgcattgtttccaccattgaagatatgcagtggatggttgataccgtaaacagcatggcaaacggttttaccatgtgcaccggttcctacggcgtgcgtgctgacaacgatctggttgatatgatcaagcagttcggtccgcgtatttacttcacccatctgcgctccaccatgcgtgaagataacccgaaaaccttccacgaagcggcgcacctgaacggtgacgttgatatgtacgaagtggtgaaagcgattgttgaagaagaacaccgtcgtaaagcggaaggcaaagaagacctgatcccgatgcgtccggaccacggtcatcagatgctggacgacctgaagaagaaaaccaacccaggttactccgcaattggtcgtctgaaaggcctggccgaagttcgcggtgtcgaactggcgatccagcgcgctttctttagccgttaatatccaccggcatggctgcgcgccgtgccggttccttcttccttgccgtcactctttgaagacggattctggagtttacgatgactactattgttgacagcaatctgccggttgcccgcccgagttgggatcattctcgtctggaaagtcgcattgtgcatctcggttgcggggcgtttcaccgcgcgcaccaggcgctgtatacccatcatctgctggaaagcaccgacagcgactggggcatctgcgaagttaacctgatgccaggcaacgaccgcgtgctgatcgaaaacctgaaaaaacagcaactgctgtacaccgtagcggaaaaaggcgcagagagcaccgagctgaaaattatcggtagcatgaaagaagcgctgcatccggaaatcgatggctgcgaaggtattctcaacgcgatggcgcgtccgcaaacggcgattgtctctctaacggtcacggaaaaaggctactgcgctgatgcggcaagcggtcaactggatctcaataacccgctgatcaagcacgatctggaaaacccgactgcgccgaagtccgcgattggttacatcgtcgaagcgttgcgtctgcgtcgtgaaaaagggttgaaagcgtttacggtgatgtcctgcgataacgtgcgtgaaaacggtcatgtggcgaaggtcgcggtactggggctggctcaggcgcgtgacccgcagctggcggcatggattgaagaaaatgtcaccttcccgtgcaccatggttgaccgcatcgttccggcggcgacgccagaaaccttacaggaaattgctgaccagctgggtgtttacgacccgtgcgccattgcctgcgaaccgttccgtcagtgggtgattgaagataacttcgttaatggtcgcccggattgggataaagtgggcgcacagttcgttgcagacgttgtgccgttcgaaatgatgaagctgcgtatgctgaacggcagccactcttttctggcgtacctcggttacctcggcggctatgaaaccattgccgacaccgtgactaacccggcttatcgcaaagcggcctttgccctgatgatgcaggaacaagcgccaacgctgagcatgccggaaggtacagacctgaacgcctatgcgacgctgctgatcgagcgtttcagcaacccgtctctgcgtcaccgtacctggcagattgcgatggacggcagccagaagttaccgcagcgtctgctggacccggtgcgtctgcacctgcaaaacggcggcagctggcgtcacctggcgctgggcgtggctggctggatgcgttacacccagggcgtggatgagcagggtaatgccattgacgtggtcgacccgatgctggcggagttccagaagatcaacgcgcagtatcagggcgcagaccgcgtgaaagcgctgctgggcctgagcggtatttttgccgatgatctgccgcagaatgccgactttgttggcgcagtgacggcggcatatcagcagctgtgcgaacgcggtgcgcgcgagtgtgtggctgcgctgtaactaactgattaccctacagacttactggtcaatcaaactgatatttggttgaccagttttcgtttttttgcccacctgtacgtgccaacttccagtgctaatggtatagtttgagattaacgggggccgtaaaattgcccgttgtaggccggataaggcgttcacgccgcatccggcaaaaatttgattaaccgcacctaacggacacaacaccatgaaatctgccacctctgcgcaaagaccttaccaggaagtcggggcgatgatccgcgatctgatcataaagacgccgtacaatcctggcgaacggctgccgccggagcgtgaaattgcagaaatgcttgatgtcacgcggacggtggtacgtgaagcgctgatcatgctggagatcaaagggctggtggaagtacgccggggtgccggtatctatgttcttgataacagtggcagccagaacacagacagtccggatgccaacgtctgcaacgatgccggtccttttgagctgttacaggcgcggcagttattggagagcaacatcgccgagtttgccgctttgcaggctacccgcgaagatatcgtcaaaatgcgtcaggcattgcaactggaagagcgtgaactggcttccagtgcgccgggcagcagcgaaagcggtgacatgcagttccatctcgctattgccgaagcaacgcataacagcatgctggtggagctgttccgtcagtcctggcagtggcgggaaaacaatccaatgtggatccagttgcacagccatctggatgacagcctgtatcgcaaagagtggttgggcgatcacaaacagatcctcgccgcgttaatcaaaaaagatgcccgagcggcgaagctggcaatgtggcagcatctggaaaacgttaagcaacgtctgctggaattcagcaacgttgacgatatttattttgatggctatctgtttgatagttggccgctggataaagtcgacgcctgacttattataataagcgcaagggtaaacgttccttgcgctttcttaaattaagaagtcgcaatgagtattactttgtaaattgcagggtattgtttagctatctgtataacctgaatgttagtactcattcttcctggtagtaaggcgagattattaaagttgccatgcagcgtccggggaagtgttgggcgctgttttttttgtttcttaataatgtgttgtaagccgtagaaggcgtgtaggtcgcaccctatgcgacctacacatcagtcaggaattacccttcacgttctaccactttaatttccaccatgccgatcccgagcttacgcgggctgtgtccgaggatattcccttcgttggtactgacaggttccggcggcacaattaccagtgtgtcggcatcggttgggttatcgaaatgcagtgtggtggtggtcacttcattgcccagcacaagagtttgttcttcattgcctacgcgtaccggaataggacggctggcgttattgccgtatgctttggcggtaatcaccaggtcaaatttcttcggcagcggatgcttgtactcgatttttacttcatcgcccagctgcgcgttggaccagcggccccagctctccggacgggaaatcccgctaaactgtttcacctcttctggcgcaccggcgacgttaaagatgaaactgtcggctttgtagcgaatatcgttatcaacaatcttcagcgtatcgacattgcctttgtaacgcgccatgtcgatgaccgtatctttaaatgccgttttgccctgccatgttgttttgtcaacatgctgaacaatttgctgaccgccaagctgcccttggctgacacaccagtcggtggaaagtgccagttccggagcccagagttgtgccatcttgtagcaacggtcaacccagacgaaattgtcgcgtggagcgaaatcggccagctggaaacgcagcggtgcactgtattcgctttccggcagcggttccacgcgtttgtcactaacccgcaacagcagcggcaaacggaaatggctaccgctgaaggcaatcatgtttttctgctggtcgatggtgaactctttcatctctttagggaatttccacaggcggatgatatctggcttccacgccaatgttttctctttgatattgaggaagatttcgctcatgctctgcccggataaactgctacgaccaagtccgagatagttatcgccaccgagaatgtccagcaccgtcgcgccgttatccatcgtgttacgcttcactgccagcgtctcttgctgcggcttgtcgccacgaatgacaaaaaacaggttattgcgatcctgcttattgaggtatttccacgccgtgttgttcatcgctaaatggtcagaagagacgacgatgacggtatctttaaaccacggactcgctttgattttgttgataaacgtcgcgatgttctcctggctgcaacttaccgcgctgaaactctgattcggtttaccgtcaaaatcatattttttgcggttacaggtacgagagataaaaccatccgggtgatgggtatcgactgtcagggtaaacagactgaatcgctgaccactgcgggaaagctcttcaaactttttccacgcttcatcgagaacggtatcgtcgtagaatccccagtcgttgcgatagtgcgggtcggctaccacgcttttcagctcttcactgccgtataagtggtcgaagccatggctcttcaggaacacatctttaccggcaaaacgcagattcgcgccctgcacgaaatagttctgataaccgctgtttttcaggatatctcccagacagatgttctgcgggaagaagctggagacagaggcggaggcgttgccttcaaagggggcaaacagcggtatgccgcactgagaagccaccatgcccgcaatcgtgtaatctgttcccggcagctgctgcgtgtggctgaaatccaggccttcatttttcaacgcgcccagttcaggcgtgagatccgggaaagcctcgttatcaaaataggtccgctcgagactttcgccgtagatataaaccaggttgagtttcgggtcagggatagttttgctcggctctttataataagccgcaaagtccgggtcgccgtcgcgactctgggatttcaccagttccgttatctgacgaaatgccgggctggcgtccacgctacccagcgccagtaagagcgccagcaggctgtaaccaaaatggtgcggatgatggcgacgacggcgcaggatccagcccagcgcaccgaacaccgctgtcagccccagcacaatgccgatacccggcaaaatgtatttgctgacgccagcaccggtcaggctgttggttaaggtatagagaaccgcgtcgttaataccatcgccagtaaaatagtcgctggcaaacagggtgatatttaaaacgacaaatagccccagcaccgttaacgtggctgcaaaccaccaggtgttacgtcccgctttccatgcgtaaatcagcacagaggcgagaaaaagggcgaaagagagtagttcactcaacgggcgatcctcactaaaccgggccgtttagccaacgtttaagctttttgagaagcacaatgtaatggcgtcgccatattgctgcaattctagtgtcaaaaaaatgcgatgttgttaggaattagtttataaacagacttttttgattacggtcacttcccgtgtaacaggggtaaaaccgtccaggagcagggaaaagggcaggagagagccgcgtcagccgggtaacagctaaaacgcggcgtttcgcggttcaggaaatgaagttcagcccctgttttaacaccagatcgcaggctttggttttcaccttttctgccagcggagttgttccgatgttatccagattgagttgctgaccatctttggttttcagcaaaccctgaatgccgtccagatagttggtgtcttctttttgctcttcactgttcaggcccagcttttccagcacctggttcttgatgttttcggcatcggttacgctcgccagcttttgcttcgcgcagtattgcagaatgcctgcggcattgttcatgttatctgcgcttaaggcctggtttccgctgctaagcaagttagttaaactcgcgaggctccaaccgccttcctgtgtcgtgctgttttggttgccaagttcgctggcggcgctggagagcgcatctttccaggacgcagcatgcaccccggtggaaattaatgcgctggcggcaatggcacagcacagaagatgtttaacagttttcatcatcattactcaaggtggaattgtgtcgcagtataccgccagaaacggggattaatactctttacctgttacccggctacggtagctatcccagttgaagatcacccacaaactgttacccaggcgcatacggtccatcacgcgttcgcccagcaacttggtcatctcttccatattactgttggtcagcatcccggttgggcgtttggaagaagagcggcgatcgacgatctggttgatgatcactttttcgtatttgctttcggtctgcacgccgatctcatcgatcaccagcagatcaacgttgctcagatcgttaagcagttgttcttcgctggtaccgctattcctgaaggtatctttcatcgcgctcataatatcggccacggtgatgatcaatacggatttaccgcgtagcagcagctcgttgcagattgccgccgccagatggtttttgccggttcctggcttaccagaaaagatgaagctggcgatgttgccgtcaaactcttcgacatactggcgcgctttgcttaacgcattcatctgcccttcacactcaacgcgatagttctcaaaggaacagttctgatgcagtggacgaataccggagcggttaaaggtgcgctgcattttcatcgcccgattttcacgttcgagagcggcggagcggatcgctccttgttctttttgccaggccagtagttcttcacccgttttgaatgcgggtttgatatgggcaggcatcattttttgcaggcgttgcatcaggtcgccaacgtttttcatcgttaccctctgaatcctggtggaatttggctgtcaggttcgctgaccgtattcacatctcgtttcggcagtccgccgttgctggcacgaccgatttgcaggctgcgcgccagtttttgttgccactgcacatggtgaaagactttaccttccgcctgccagtaggcaatgaaactggccagttcttcggtggtcaccggctctcttagcgccacgccccatagcgccgccaggcggataaaatcggcatcgggttgccagtccggatacatggcgaatttccccatgggtacagcaacgggagcggcttgcggttcctgatagagttgatcgtccagagcgacatcgcttcccggacgcgccagcttttcttccagcgccagcagttcagccaggcgtgcaggcgtgacggcataaaacgccggggcattgttagcaaatacggcaaccacaccgccttcagcttttgccagaacggtttggtgatcgtgtaccagggcgtcaataccaacgacgtccggggtcaaaactctggaagacatactgtttctcaaatatggaacgatgaacgagaagggagataacttttatagtaacacacggaggagaggaggctgtctctcatccgtgtgcttaagcgaggcaattttatacgcgagggcgcttgcggtacaaccataatccaggaatggaaagaccgatggataacgcaccaacaatgctactagctgtaagaaagttggttaacagggtaatcatcaacggttcgctgtaacctaactggctgatttttaccgcgctaatcattgcggtataagcgcttatgcccgggaacatagggataacggccgccacggtaaacactttcggatgcgccagataccagcggctccattgaataccaatggtaccgaccagcatagaagccataaaggtactccactcaatattcaacccgctggtcatcaagatcattcgggaaccatgacctatcgagccaagcagcgcacaccagcgtaacgcccgcacgggaacgttgaacaccatcgcaaagccgaccgcaggaatggcggcgaggatcatatcctgcgccaacgctaacagaaattcgatcacacccatccgcgtagcccccaaatcgtcagtgccatcactacgccgacgcaggtagccagtgtcagcagactggcgatcgcccagcgtgccagtccggtattgatgtggcctttaaacatatcggcgacggcattaatcaacggaaagcccggcactagcagcagaacgctggcggccatcgcaatggtgggggtattgctgaaagtggggagttgcaaaagcaatccggaaatggtggtggcggcgaaagcggtaaggcaaaagttgatctgtggatgaagatgacgttgtgccagcagctggcggatatacatcgcggtcgtactggcaaagaaggtgatgacggcaccatcccagccaccgttattgagtttacagaaacaggcgcaagaaaggccaaccattaaggctaccagccatcttgggtaacgtaatggctgaatttggctaaatcgtttctctacgcctttgtaatccagcagatgatgctccgcaagaatcacaatgtgctggacttcagtcaccacatgcatattaatgccgcgatcgtgatttttacgtgtgcttgtcaggcattgcccatctttaatagttgtcagcactatggcgttgctagagatagaactttcgacgctgtccattcccagtgcccgacccagtcgactggaaagctcatcaaccaacgcgctttccgcaccatgttgcaaaagaaataatccacactggatacaaagccgtgttacggctcgctgttgctcagtttgcataactcgccctttgtcatagacgtgctgcgtattgttcagataatgagaatccatttgtatcatgaagcacggttgttttgcggtaggttaagatcaaaattgcgctgattaatcctggttatcgggagaagctcggtgataaaaagcgaattatctctcgccgcaaacaaactatcacatgaatattatcatcataatgaatttattgtttggcctttacgaatcaggataatagataaccgggcacgttttttaatgttaacaagctaaaaccatcagatttcattgaataaatattggttgtgtgattttgcattctgcgggaagggatatcatttaattataaattaaatgaatgtgatttctgtttttcattaagtattcctaacaacttaatgtagatattttaaatgtctccaggctatttcaccaggttatcatttgatgctaaccttctgacacatgcagtggagttgttgtgcagcaggagtatgctgatatgaaagtgaatgctaaggataatttattcgcttaatctattaatttgctggaaacatttaaggaatgaatatcctgaataaaccatcataatttttagacagtggatgtggaggaaatatgttgccaggatgctgcaaaaatggaattgttatcagtaaaatacctgttatgcaagcagggttaaaagaggtcatgaggactcacttccctgaatatgaaataatatccagcgcctctgcggaggaccttaccttattacaattacgtcgttccggattagtcattgctgatttagccggtgaaagtgaagatccacgttctgtttgtgaacattattattctttaatcagtcaatatcgggaaattcactgggttttcatggtgagtcgctcctggtattcccaggcagtagaactgctcatgtgccctacggcgacgttattgtctgatgttgaacccattgagaatctggtcaagaccgtacgttccggcaatacgcacgcagagcgtatcagcgccatgctgacctccccggcaatgactgaaactcatgattttagctatcgctccgtcattctcactcttagtgagcgcaaggtactgcggctattaggtaaaggatggggcatcaaccagatagctagtttgcttaagaaaagtaataaaactatcagcgcccaaaaaaacagtgcgatgcgtcgactggcaattcacagcaacgctgaaatgtatgcatggataaatagcgcgcagggtgcaagagaacttaacttgccttctgtttatggagatgccgcagaatggaacacagccgaattaagaagagaaatgagccacagttaaaaaaatgcgtcatgagtagtatcggtattgagagtttattcagaaagtttgcgggtaacccttataagctccatacctataccagtcaggagagttttcaggatgccatgagccggatcagctttgcggcggtcattttttctttttctgccatgagaagtgagcgcagagagggattatcttgcctgactgaactggcgattaagtttccgcgtacccggcgtttagttattgcggatgatgatattgaagctcggctgattggtagtttgagcccaagtccgctggacggtgtattaagtaaagcgagtacgctggagatttttcatcaggaactctttttgagtttaaatggtgtacgtcaggcgaccgaccgactgaacaatcagtggtacattaaccaaagccggacgttaagcccgacggagagagaaatattgcgctttatgagccgtggctacagtatgacacaaattgccgagcagcttaaacgcaatatcaaaacgatccgtgcacataaatttaatgtgatgagcaaactgggcgtcagttctgacgcagggttgttggaggccgcagatattctgttatgtatgcggcattgcgaaacaagtaatgtgttgcatccctattaatccgcatgatgccgggtttacttccccggcagtgctttcatttcagcgtacaatcgccacattgctgcacatccggtaagcgataacgctggcagcaagtgcggcgcaccagcaggccgtcgcgcagtaccacggtacgccagagtggattatcttcaccgttcgtgagcgttttctcaaaaaagagggcatggcgcaggctttcaacagtagcctcgccgagcagttgcttcatctcagtgagataccagttgatcaaataaccggtattactccagataagtttgccgttgatctctccggtcgcttctagtgcttgcacaaccggaaccagcgcctggctgattaacgtttccattcgatgctgcgggctatgtggtgttgcgtttttatcttcacacacatcgacccagaaacaggcgacgcgtccggtttcgtgaaactcagcatggaaatgttccgggctcacatctaatgccttttcctgcgtcagtagcgccagcattaatggtggcaccatcaggccgatataccattgtgcccatagactgatcagcggtttgttctcgcggatcatcatcggttggttgcgatagatatgatcggaatagaccgccagcagagaacttagcacattcggactactccattgcgccagcgtcatggcgttaagtggggcaggttcatccaggcggataaactccagcaaatgttcacgatgttttgcgatcgtcgcccgcacggcttgcgcaagcgtgggatcctgcggctggagatgcgttcgccagatgacatcttcatagagcggtgcggaacgataggccataatcgggatagtaatctaaatgataatgattgctaatcatagcgataggtttacccgatagcaagggatttatctggcttgcaaatgataaaaattatcatatgatattggttatcattatcaatgaaagagatgaaatcatgttgcaacgtacgctgggcagtggctggggagtgttgctgccgggattgctgattgcagggctgatgtatgcggatttaagcagtgatcagtggcggattgtcattctgatgggattagtattgacgccgatgatgctgtatcacaaacagttgcggcattacattttgctaccaagctgcctggcacttattgctggcatcatgctgatgataatgaatttgaatcagggatgaaaaatcaaggaagaaacaagaaaggaagtaaagataattggtgcgaggggggggacttgaacccccacgtccgtaaggacactaacacctgaagctagcgcgtctaccaattccgccaccttcgcacagtcatcttactttttttgatatcgcctcgtttggtgcgaggggggggacttgaacccccacgtccgtaagaacactaacacctgaagctagcgcgtctaccaattccgccaccttcgcccagtgcgagcaatatcaacgtggtttttggtgcgaggggggggacttgaacccccacgtccgtaaggacactaacacctgaagctagcgcgtctaccaattccgccaccttcgcataccatcaattcttaaaaagaattgctaccacggaggcgcattctagtggttttcagcttttcgtcaatagttaattatcgacagaggtgtaattgctggaaaaatgtccatcaggaaactagcgtgcaggtttggtatgcatgcgggggcagatgccagatgcgacgctggcgcgtcttatctggcctacgaagggctaacgtgcaggttttgtaggtcggataaggcgttcacgccgcatccgacacggtattcggcgagataattaacctttcttcgcctggcgggtcataatggcgcgatacaccttgaagcgccctgtttgcgcgatcacttcgtggaagccaaatgtctcatccagcacgtccggataaggcaggaaggcgttcgctacaattcgcagctcgccgccgctattaagatgacgcaccgcaccgcgaatcagcgtttgcgccgcatccaggctggtttgcatcccatcgtggaacggcgggttggagatgatcatatcaaaacgacctttcacctcggaaaagacgttgctggcaaagacttcaccttcaacaccgttggccgcaagtgttgcgcggctggcttctaccgccggggcagagacatcgcacaaggtgagacgaattttcgggctatggcgcgcaaaggcaacactaagcacgcccgcgccacagccgacatccagcactttacctttcgtgtgcggagttaacgtgctgagcagcaactggctaccgacatccagaccgtcgcggctaaacacgccaggcagcgttttgaccgtcaggccatcgacgctgtattcgccccagaatttctccgcatcaaataccggctgtttttccagacgaccaaaatagaggccacagcgacgagcgctgtcgactttattcaacggcgcataatctgccagcatctgctcggcgctgcgcacgccgctgcggttctcgccaacgacaaaaatatctgtccccactggcagcagagaaagtaaattcatcaactggaactgggcttccggtttgttcttcggccagtagtaaatcagcgtatcgcaatctgcgacgtcatccgccgtggcgaccagactgaaacgggcgttatcccccatctggcggcttaatacctgccagtggtggaattgctgggtatgagcacggctggccgcggtatctaaacgcgcgggcaggtcatcctgtaagtctccggcaaacagaatacggctttgttcgaaatcatcactgtgacgcagcaagacttcacttgccggggtaaatgcagacatggaatgctcctcaattgatactggcggcgattatagccatatgttggcgcggtatcgacgaatttgctatatttgcgcccctgacaacaggagcgattcgctatgacatcccgacgagactggcagttacagcaactgggcattacccagtggagcctgcgtcgccctggcgcgttgcagggggagattgccattgcgatcccggcacacgtccgtctggtgatggtggcaaacgatcttcccgccctgactgatcctttagtgagcgatgttctgcgcgcattaaccgtcagccccgaccaggtgctgcaactgacgccagaaaaaatcgcgatgctgccgcaaggcagtcactgcaacagttggcggttgggtactgacgaaccgctaagtctggaaggcgctcaggtggcaagtccggcgctcaccgatttacgggcaaacccaacggcacgcgccgcgttatggcaacaaatttgcacatatgaacacgatttcttccctcgaaacgactgatttaccggcggcttaccacattgaacaacgcgcccacgcctttccgtggagtgaaaaaacgtttgccagcaaccagggcgagcgttatctcaactttcagttaacgcaaaacggcaaaatggcggcgtttgcgattacgcaagtggtgctggatgaagctacattgttcaatattgcggtcgatcctgactatcagcgtcagggattgggaagggcgctgctggaacatctgatcgacgaactggaaaaacgcggcgtggcgacactatggctggaagtccgtgctagtaacgctgccgccattgccctgtacgaaagtttaggctttaacgaggcgacgattcgccgcaattactaccccaccacggacggtcgcgaagacgccatcatcatggcgttgccaatcagtatgtaatacaaggtggaataatgaagtgggactggattttctttgatgccgatgaaacgctgtttacctttgacagtttcaccggcctgcagcggatgtttcttgattacagcgtcacctttaccgctgaagattttcaggactatcaggccgttaacaagccactgtgggtggattatcaaaacggcgcgatcactagtttacagcttcagcacgggcggtttgagagctgggccgaacggctgaacgtcgagccaggtaaactcaacgaagcctttattaatgcgatggcggaaatctgcacgccgctgccgggcgcggtttctctgcttaacgccattcgtggcaacgccaaaatcggcatcatcaccaacggctttagtgccttgcaacaggtgcgtctggaacgcacgggcctgcgtgattacttcgatttgctggtgatttccgaagaagttggcgttgccaaaccgaataagaaaattttcgattatgcgctggaacaggcgggcaatcctgaccgtagtcgcgtgctgatggttggcgacactgccgagtccgatattctcggtggcatcaacgccgggcttgcgacctgctggctgaatgcacaccatcgcgagcaaccagaaggcatcgcgcccacctggaccgtttctagcttgcacgaactggagcagctcctgtgtaaacactgattgcctcccccccgttgatgggtaaaatagccgcaatttttcgttttcaacaagcgcggcgcgatgccgcttactcaagaagaaagaattatgacgttgtctccttatttgcaagaggtggcgaagcgccgcacttttgccattatttctcacccggacgccggtaagactaccatcaccgagaaggtgctgctgttcggacaggccattcagaccgccggtacagtaaaaggccgtggttccaaccagcacgctaagagcgactggatggagatggaaaagcagcgtgggatctccattactacgtctgtgatgcagtttccgtatcacgattgcctggttaacctgctcgacaccccggggcacgaagacttcagcgaagatacctatcgtaccctgacggcggtggactgctgcctgatggttatcgacgccgcaaaaggtgttgaagatcgtacccgtaagctgatggaagttacccgtctgcgcgacacgccgatcctcacctttatgaacaaacttgaccgtgatatccgcgacccgatggagctgctcgatgaagttgagaacgagctgaaaatcggctgtgcgccgatcacctggccgattggctgcggcaagctgtttaaaggcgtttaccacctttataaagacgaaacctatctctatcagagcggtaaaggccacaccattcaggaagtccgcattgttaaagggctgaataacccggatctcgatgctgcggttggtgaagatctggcacagcagctgcgtgacgaactggaactggtgaaaggcgcgtctaacgagttcgacaaagagctgttccttgcgggcgaaatcactccggtattcttcggtactgcgctgggtaacttcggcgtcgatcatatgttggatggcctggtggagtgggcacctgcgccgatgccgcgtcagactgatacccgtaccgtagaagcgagcgaagataaatttaccggcttcgtatttaaaattcaggccaacatggacccgaaacaccgcgaccgcgtggcgtttatgcgtgtggtgtccggtaaatatgaaaaaggcatgaaactgcgccaggtgcgcactgcgaaagatgtggtgatctccgacgcgctgacctttatggcgggtgaccgtagccacgttgaagaagcgtatccgggcgatatcctcggcctgcacaaccacggcaccattcagatcggcgacacctttacccagggtgagatgatgaagttcaccggtattccgaacttcgcaccagaactgttccgtcgtatccgcctgaaagatccgctgaagcaaaaacagctgctcaaagggctggtacagctttccgaagagggcgcggtgcaggtgttccgtccaatctccaacaacgatctgatcgttggtgcagttggtgtgctgcagtttgatgtggtggtagcgcgcctgaagagcgaatacaacgttgaagcagtgtatgagagtgtcaacgttgccactgcccgctgggtagaatgtgcagacgcgaagaaattcgaagagttcaagcgtaagaacgaaagccaactggcgcttgatggcggcgataacctcgcttacatcgctaccagcatggtcaacctgcgcctggcacaggaacgttatccggacgttcagttccaccagacccgcgagcattaattcttgcctccagggcgcggtagccgctgcgccctgtcaatttcccttccttattagccgcttacggaatgttcttaaaacattcacttttgcttatgttttcgctgatatcccgagcggtttcaaaattgtgatctatatttaacaaagtgatgacatttctgacggcgttaaataccgttcaatgcgtagatatcagtatctaaagccgtcgattgtcattctaccgatattaataactgattcagaggctgtaatggtcgttattcatcactcatcgcttttgtgatggcgaccattgacttctgtagagggtgaagtctctccctattcagcaatgcaacctcgtgttgccaggctcaaattacgagcaaacatacaggaataaatcgatgactatgacaagactgaagattagcaaaactctgctggctgtaatgttgacctctgccgtcgcgaccggctctgcctacgcggaaaacaacgcgcagactaccaatgaaagcgcagggcaaaaagtcgatagctctatgaataaagtcggtaatttcatggatgacagcgccatcaccgcgaaagtgaaggcggccctggtggatcatgacaacatcaagagcaccgatatctctgtaaaaaccgatcaaaaagtcgtgaccctgagcggtttcgttgaaagccaggcccaggccgaagaggcagtgaaagtggcgaaaggcgttgaaggggtgacctctgtcagcgacaaactgcacgttcgcgacgctaaagaaggcagcgtgaagggctacgcgggtgacaccgccaccaccagtgaaatcaaagccaaactgctggcggacgatatcgtcccttcccgtcatgtgaaagttgaaaccaccgacggcgtggttcagctctccggtaccgtcgattctcaggcacaaagtgaccgtgctgaaagtatcgccaaagcggtagatggtgtgaaaagcgttaaaaatgatctgaaaactaagtaattcgtcgtaattcgtcctcccgaactttgtcgggaggcgcgatgtgcaccacactaaaaatatcgcattgagtgattttcacgctcatatcaagcggtgacattaactatggtaaaggagacgcttatgtttcgttggggcatcatatttctggttatcgcgttaatcgccgccgcacttgggtttggtggtctggccggtaccgctgcaggcgcagctaaaattgtctttgtcgtcgggattattctgttcctggtgagtttgttcatgggccgaaaacgaccctaaatttcagaccattaagaaaattttatccaaagccagtccagcggactggcttttgcggttttagcgaataataaattgcgttactttgtcattctttcacaacaaaaacaggaaggcagaggtggggcagcgaatacctgtaacgcttggtaatattgcgccgttgagcctaaggccgttccagcctggacgaatagctctggtgtgcgaaggcggcggacagcgtggaattttcacggctggcgtgctggatgagtttatgcgcgcgcagtttaatcctttcgatctttatctcggcacatctgccggggcgcagaacctcagcgcgtttatctgcaatcagcccggttacgcgcgcaaagtcatcatgcgctataccacaaaacgcgaatttttcgatccattgcgctttgtccgtggaggaaatcttatcgatctcgactggctggtggaggccactgcaagccagatgccgttgcaaatggataccgccgcgcggttgtttgacagcggcaaaagcttttatatgtgcgcctgtcgtcaggatgactacgcgccgaattactttttaccaaccaaacaaaactggctggatgtgattcgcgcctccagtgcgatacctggcttttatcgtagcggagtgagcctggaaggcattaactacctggatggcgggatcagtgatgcgattccggttaaagaggcggcaaggcagggcgctaaaacgttggtcgtcattcgcactgtgccgagtcaaatgtactacacgccgcagtggttcaaacgcatggaacgctggctgggtgacagtagcctgcagccgctggtcaatctggtgcagcatcatgaaaccagctatcgtgacattcagcaatttattgagaaaccaccgggcaagctgcggatattcgaaatttatccgccgaagccattacatagtatcgcgcttggcagtcggattccggcgctgcgtgaagactataaacttgggcgtttatgcggtcgttatttcctcgccacggttggcaagctattaactgaaaaagcgccgcttacccgccatctggtgccagtggtgacgccggaaagcattgtcattccgcctgcgccagtcgccaacgatacgctggttgccgaagtgagcgacgctccgcaggcgaacgacccgacatttaacaatgaggatctggcttgatttgccgttttatcgacacccactgccattttgatttcccgccgtttagtggcgatgaagaggccagcctgcaacgcgcggcacaagcgggcgtaggcaagatcattgttccggcaacagaggcggaaaattttgcccgtgtgttggcattagcggaaaattatcaaccgctgtatgccgcattgggcttgcatcctggtatgttggaaaaacatagcgatgtgtctcttgagcagctacagcaggcgctggaaaggcgtccggcgaaggtggtggcggtgggggagatcggtctggatctctttggcgacgatccgcaatttgagaggcagcagtggttactcgacgaacaactgaaactggcgaaacgctacgatctgccggtgatcctgcatagtcggcgcacgcacgacaaactggcgatgcatcttaaacgccacgatttaccgcgcactggcgtggttcacggtttttccggcagcctgcaacaggccgaacggtttgtacagctgggctacaaaattggcgtaggcggtactatcacctatccacgcgccagtaaaacccgcgatgtcatcgcaaaattaccgctggcaagcttattgctggaaaccgacgcgccggatatgccgctcaacggttttcaggggcagcctaaccgcccggagcaggctgcccgtgtgttcgccgtgctttgcgagttgcgccgggaaccggcggatgagattgcgcaagcgttgcttaataacacgtatacgttgtttaacgtgccgtaagccggataaggcgttcacgccgcatccggcagttggcgcacaatgcctgatgcgacgcttaacgcgtcttatcatgcctacaggtttgtgccgaaccgtaggccggataaggcgttcacgccgcatccggcagttggcgcacaatgcctgatgcgacgcttgtcgcgtcttatcatgcctacaagtctgtgccgaaccgtaggccggataaggcgttcacgccgcatccggcagtcggcgcataatgcctgatgcgacgcttgtcgcgtcttatcatgcctacaggtttgtgccgaaccgtaggccggataaggcgttcgcgccgcatccggcagttggcgcacaatgcctgatgcgacgcttgacgcgtcttatcaggcctacaagtctgtgccgaaccgtaggccgtatccggcatgtcacaaatagagcgccggaaatatcaaccggctcaccccgcgcacctttaacgcatcagccaacggctcaacgtcttccggcgtggcgctcgcccagctttgcgcctcgccatacacgccgtgggcatgaaacgcgttcaggcgtaccggaacatcgccgagtcccttgataaacgccgccagttcttcgatgtgttgcaaataatccacctggccagggatcaccagcaaacgcagttccgccagcttgccgcgctctgccagcaaatagatgctgcgcttaatctgctgattatcgcgtccggtgagttgttgatgacattcgctcccccacgctttgagatcgagcattgcgccgtcgcacaccgggagcaatttttcccagccggtttcgctcaacatgccgttactgtccaccagacaggtgagatggcgcagttgcggatcgtttttgatagcagtaaacagcgccaccacaaacggcagctgggtcgtggcttcaccgccactcaccgttatcccttcgataaacagcactgctttgcggacatggctaagcacttcgtccacgctcatggattgcgccatgggcgtggcatgttgcggacacctcttcaggcaggtatcacactgctcgcaaaccacagcgttccacaccactttgccgtcaacaatctgcaacgcctgatgcggacactgtggcacgcactccccacagtcattgcaacgtcccatcgtccacggattgtgacagtttttgcagcgcagattgcagccctgcaaaaacagagccagacgactgcctggcccgtcaacgcaggagaaggggataatcttactgactaaagcgcatctgctgttcatggcttatcacgcgcggctggcgttccagaatacgagtgttgcgtgcggcttcttcgcccagccaggtggtgttggtgcgactaccttcggcgcgatatttttctaaatcgctcaaacgcaccatataaccggtaacgcgaaccagatcgttaccgctgacattggcggtaaattcacgcattccggctttaaaggcaccgaggcaaagctgtaccagtgcctgcgggttacgtttgatggtttcgtcgagcgtcagaatgtcgctgatgccggaataataataagcatgatgcggggcgacagtttgcagatgggtgatcggatctggctcatcgccatacggcaaacgcgcgcccggcgtggtgccgatatcggaactgatcccgctctgtgcgtgtaacatggcgcgtttttgccagccatatttcacgggggtattggcgacaaactccgccagttgcgcgctgatgcgataacctacttcatttgcggcggcttctttaccgtagcgcgcggcaatcccttctttttcacacagcaagttaaccgcttccgccagcccatacatgccaaacattggcacaaaacgttcagggttaatcagcccttctttcaccaggaagctattctcaaagaagtgactttgttgatagaggaattcacaccgcgcatcgatgatggcgatctgctgctggcagtagtgcggtagagtgcgcgtaaagaagtcatccaggctttcgctgcgctcggcaatggctttcaggttaaggcgtaccagcgtgctgccaccacccgccagcggcagactgttgtaacagctcacaatcccgtagcccccttttgtgaaaattttatcatgcaccggaccgttggcgatgtgcggtttgctacattcacagatgttcttcgccacttccagcagcaggtcatcaggggtgatttcaggatcgtagataaaggtcaggttcggactaacctgcttcaactctgcatctgcacgtaagatcgcgcgggtaatggggctatcagacgggccgatattggcgtgcataaaggcgtctggcagggttctgtcgaggtaacgccagaaacgttttattcgaacatcgatctcgtcttgtgttagaattctaacatacggttgcaacaacgcatccagttgccccaggtagaccggcatgcttgtgacgctcggtacgtggtggtaaagaatggtcagcagagagagtgcgtcatcaagatctttcgcgccttccagctccagccattcggaaccgttcgccagaaaacgggcgtaatcgggtaagacatagcgcggtttgtacggcgcatgaccttcaaacatatcgcagattacaccttcatccagcgcgcggcgggcttcggcaggaagctgtgggtaaggcagattgttttctgcttccagtgccagaaaatggcgcttctgctccgggctaagcactgggctggtgacaatttgctggcaacgttgttgcagtgcattttcatgagaagtgggcatcttcttttccttttatgccgaaggtgatgcgccattgtaagaagtttcgtgatgttcactttgatcctgatgcgtttgccaccactgacgcattcatttgaaagtgaattatttgaaccagatcgcattacagtgatgcaaacttgtaagtagatttccttaattgtgatgtgtatcgaagtgtgttgcggagtagatgttagaatactaacaaactcgcaaggtgaattttattggcgacaagccaggagaatgaaatgactgatctgaaagcaagcagcctgcgtgcactgaaattgatggacctgaccaccctgaatgacgacgacaccgacgagaaagtgatcgccctgtgtcatcaggccaaaactccggtcggcaataccgccgctatctgtatctatcctcgctttatcccgattgctcgcaaaactctgaaagagcagggcaccccggaaatccgtatcgctacggtaaccaacttcccacacggtaacgacgacatcgacatcgcgctggcagaaacccgtgcggcaatcgcctacggtgctgatgaagttgacgttgtgttcccgtaccgcgcgctgatggcgggtaacgagcaggttggttttgacctggtgaaagcctgtaaagaggcttgcgcggcagcgaatgtactgctgaaagtgatcatcgaaaccggcgaactgaaagacgaagcgctgatccgtaaagcgtctgaaatctccatcaaagcgggtgcggacttcatcaaaacctctaccggtaaagtggctgtgaacgcgacgccggaaagcgcgcgcatcatgatggaagtgatccgtgatatgggcgtagaaaaaaccgttggtttcaaaccggcgggcggcgtgcgtactgcggaagatgcgcagaaatatctcgccattgcagatgaactgttcggtgctgactgggcagatgcgcgtcactaccgctttggcgcttccagcctgctggcaagcctgctgaaagcgctgggtcacggcgacggtaagagcgccagcagctactaagtaagatgctttacgcctgatgcgctgcgcttatcaggcctacgagacgtatctacccgtaggccggataaggcgtagacgcatccggcaaaagccgcctcatactcttttcctcgggaggttaccttgtttctcgcacaagaaattattcgtaaaaaacgtgatggtcatgcgctgagcgatgaagaaattcgtttctttatcaacggtattcgcgacaacactatctccgaagggcagattgccgccctcgcgatgaccattttcttccacgatatgacaatgcctgagcgtgtcagcctgaccatggcgatgcgagatagtggaaccgttctcgactggaaaagcctgcatctgaatggcccgattgttgataaacactccaccggtggcgtcggcgatgtgactagcctgatgttggggccgatggtcgcagcctgcggcggctatattccgatgatctctggtcgcggcctcggtcatactggcggtacgctcgacaaactggaatccatccctggcttcgacattttcccggatgacaaccgtttccgcgaaattattaaagacgtcggcgtggcgattatcggtcagaccagtagtctggctccggctgataaacgtttctacgcgacccgtgatattaccgcaaccgtggactccatcccgctgatcaccgcctctattctggcgaagaaacttgcggaaggtctggacgcgctggtgatggacgtgaaagtgggtagcggcgcgtttatgccgacctacgaactctctgaagcccttgccgaagcgattgttggcgtggctaacggcgctggcgtgcgcaccaccgcgctgctcaccgacatgaatcaggtactggcctccagtgcaggtaacgcggttgaagttcgtgaagcggtgcagttcctgacgggtgaatatcgtaacccgcgtctgtttgatgtcacgatggcgctgtgcgtggagatgctgatctccggcaaactggcgaaagatgacgccgaagcgcgcgcgaaattgcaggcggtgctggacaacggtaaagcggcagaagtctttggtcgtatggtagcggcacaaaaaggcccgaccgacttcgttgagaactacgcgaagtatctgccgacagcgatgctgacgaaagcagtctatgctgataccgaaggttttgtcagtgaaatggatacccgcgcgctggggatggcagtggttgcaatgggcggcggacgccgtcaggcatctgacaccatcgattacagcgtcggctttactgatatggcgcgtctgggcgaccaggtagacggtcagcgtccgctggcggttatccacgcgaaagacgaaaacaactggcaggaagcggcgaaagcggtgaaagcggcaattaaacttgccgataaagcaccggaaagcacaccaactgtctatcgccgtatcagcgaataacggtatactgatctgatcatttaaatttgaagcactgagtacggagaacatatgaaacgtgcatttattatggtgctggacagtttcggcatcggcgctacagaagatgcagaacgctttggtgacgtcggggctgacaccctgggtcatatcgcagaagcttgtgccaaaggcgaagctgataacggtcgtaaaggcccgctcaatctgccaaatctgacccgtctggggctggcgaaagcacacgaaggttctaccggtttcattccggcgggaatggacggcaacgctgaagttatcggcgcgtacgcatgggcgcacgaaatgagttccggtaaagataccccgtctggtcactgggaaattgccggtgtcccggttctgtttgagtggggatatttctccgatcacgaaaacagcttcccgcaagagctgctggataaactggtcgaacgcgctaatctgccgggttacctcggtaactgccactcttccggtacggtcattctggatcaactgggcgaagagcacatgaaaaccggcaagccgattttctatacctccgctgactccgtgttccagattgcctgccatgaagaaactttcggtctggataaactctacgaactgtgcgaaatcgcccgtgaagagctgaccaacggcggctacaatatcggtcgtgttatcgctcgtccgtttatcggcgacaaagccggtaacttccagcgtaccggtaaccgtcacgacctggctgttgagccgccagcaccgaccgtgctgcagaaactggttgatgaaaaacacggccaggtggtttctgtcggtaaaattgcggacatctacgccaactgcggtatcaccaaaaaagtgaaagcgactggcctggacgcgctgtttgacgccaccatcaaagagatgaaagaagcgggtgataacaccatcgtcttcaccaacttcgttgacttcgactcttcctggggccaccgtcgcgacgtcgccggttatgccgcgggtctggaactgttcgaccgccgtctgccggagctgatgtctctgctgcgcgatgacgacatcctgatcctcaccgctgaccacggttgcgatccgacctggaccggtactgaccacacgcgtgaacacattccggtactggtatatggcccgaaagtaaaaccgggcagtctgggtcatcgtgaaaccttcgcggatatcggccagactctggcaaaatattttggtacttctgatatggaatatggcaaagccatgttctgatggatttgggcggagcgttgactccgcctttgttatgtcacaaaaaggataaaacaatggctaccccacacattaatgcagaaatgggcgatttcgctgacgtagttttgatgccaggcgacccgctgcgtgcgaagtatattgctgaaactttccttgaagatgcccgtgaagtgaacaacgttcgcggtatgctgggcttcaccggtacttacaaaggccgcaaaatttccgtaatgggtcacggtatgggtatcccgtcctgctccatctacaccaaagaactgatcaccgatttcggcgtgaagaaaattatccgcgtgggttcctgtggcgcagttctgccgcacgtaaaactgcgcgacgtcgttatcggtatgggtgcctgcaccgattccaaagttaaccgcatccgttttaaagaccatgactttgccgctatcgctgacttcgacatggtgcgtaacgcagtagatgcagctaaagcactgggtattgatgctcgcgtgggtaacctgttctccgctgacctgttctactctccggacggcgaaatgttcgacgtgatggaaaaatacggcattctcggcgtggaaatggaagcggctggtatctacggcgtcgctgcagaatttggcgcgaaagccctgaccatctgcaccgtatctgaccacatccgcactcacgagcagaccactgccgctgagcgtcagactaccttcaacgacatgatcaaaatcgcactggaatccgttctgctgggcgataaagagtaattgtgtttcgctgcaaggcgattgccttgtgaagccggagcgggagactgctccggctttttagtatctattcatttttctctccagcttgaatattttcgctatacttttcagtgaaatgtgttaataaatctattcaagtatctattcacgaatctattcattaatgagcgagctgactgatcttttactgcaagggccgcgttctgccccggaattgcgccagcgtctggcaatcagtcaggcgacgttcagtcgccttgttgccagagaagatcgggtgattcgctttggtaaagcacgggcaacgcgatatgcactgctgcgtccttatcgcggaattgagcgtattcccgtctggcgggtggacgataccggaaaggcgcataaattcgccgacatccggttgtgctggccgcagggaagttgtctggtaacaggcgcagatggcgacgaacagtggtttgatggtttgccctggtatttgaccgatctccgaccgcagggctttttagggcgcgcgtggggcaggaagttagccgcgcaactgaatctgactgatgatatacgtctctggcaggaagaagatgtgctctacgccctgaccgtatttaacggtgaatatactggcggttggttggtcggggaggggaattatcagcgatggattactgcacaacaccctgcggaaattcctctggatcaaaaactcacccattacgaacagctggcaagtgatgcactggcaggagaaattgtgggttcttctgcgggcggcgagcagccaaaatttacctactatgcacaaacgccgagtggcaataaacatgtgttggtgaaattcaccgtaccacagcaaaccgcggtcagccaacgttggggtgacctgctaattgctgaatctattgccgcgcaaatcctgcgtgacggtgggatccacgccatcgagagtacggtgcttgtaacaagtaacaggcaggtattcctcgaagcggaacgctttgactgcaaaggtaacgatggtcgcttgcctattgtgagcctggaggcggtgcagagtgagtttatctcttctccgggaagctggccgcaggcaatgcgccgtttgtgtgagcaacaacttgtcactcaccagagcgtggcgcaaacagaagtgatctgggcatttgggcgacttatcgccaacagcgatatgcacgcaggtaatttaagcttttatttatctgaaccgccatttgcgctgacgcccgtctacgacatgctgccgatggtctatgcaccaaacagcgctggaatgctgcgtgatgctgccattgaggtgaagtttgatcttaacgtcagtaaaagcgcttggttaacggcgatcccgctggcgcagcagttctggcaaacggtcgccagagatccgcgtatcagcgaggcgtttcgccacattgcgcaagaaatgccggaaaaaatccggcaaatcgaagagaaagttgcccgcatgggcgggtaattaccttacagcccccgccatccatgcgcttaactcccgtagctctttttcctgttccgggaagtcaaccaacagcgcttcgcactcctgttgcagcatatctgcgcggtacaggcagccttgcagtcgtccggcgagggcttccagcggcgcggggttgaggctgtcggtaaacacctgggcgcgggtgatatggcctttttcaacgtcgaaatgcagttccacgccgccccaggtaaagcgttcatccagcagatggctgaatgccggagcctgaccgaagttccattcccagctactctggcgggcaaaggtttcggcgaagtttggcaagtctggcgttttgttcggggagatgatttccgcttccacgcgctcgccataatgggcgaaaaaggcctcggttatggcctcgcaaacctgctcatgggtgatccccggcaacagctcggtgaggttggtcacgcgggaacgtacgctcgtaatgcctttcgccgccagtttctttttatccggattgagatagtttgccaggcggctgaggtcggcattgagtagcaaggtgccgtggtggaagccgcgatctttggtttcgcgataggcgctgccactgactttgcggtcgccttcgacggttttcaccaccagatcgttacgtccggacgcttcggcgctgacgccgagcgcgttcagcgcattgagcacaatgctcgtggagatagttttatcgtactccggcttgccagccataaaggtaaagcaggtattgccgagatcgtggaacaccgcgccgccaccgctactgcgccgcgccaggcggacgttatcttcttccatccgccgggtattacactctttccacgggttctgcgcgcgaccaattactaccgtgtcggcattgcgccagagaaacagaacgcgctgcgtggcgggcatttggcgaaaaatacactcttccaccgccaggttaaaccacgggtcgtaagagtcagagatgagcaggcgtaatgtggacataacgatttcctttcttgtagtaatgggtcactcttttttctcgctttcttcctcttccggcaccggtttgctggcggttaacaggaaggggctttgctgccagcgggtgcgtttaccctgtagcagcgtgcgggtcagcactacaccgattgccagactgagcagcaacatcaggcgtaaaatgttagtggtgttatccacctgttgggcttcggtggcgagcgtatgggtgtcgagtgtcaggcgcagatagccgagcggtccgtttttacccgcaattggctcgacaatctgctggttaaaatagccgcctgcttttttaccgtcgagcgccagccggtcgcgcacttcgacgctttcgccagaacgtgcgataagatcgccttgttcgtcatacacacccgcgtcgaggatacggctttcatccgttaactgatcgaggatcgcctgaatgcgtttttcatccggactgtcggtacgcatcagcggtgcaacgttcagcgtcacctgacgcgccagggtgcgggccagttcttccagctgtggattacgctgtcgctggtggttttgactaaaccaactcgctccctgcatcagcgccactaacaaggcaagacagaacaggacaatcactgcccgatgcagccggaatttcagttttgtgcgagccatcttccaccctttgaaaatttgagacttaatgttgccagaagcaatggatacaaggtagcctcatgcgttattttccctgcttcgaacgattttacaggagccttaatgcctaacattacctggtgcgacctgcctgaagatgtctctttatggccgggtctgcctcttagtttaagtggtgatgaagtgatgccactggattaccacgcaggtcgtagcggctggctgctgtatggtcgtgggctggataaacaacgtctgacccaataccagagcaaactgggtgcggcgatggtgattgttgccgcctggtgcgtggaagattatcaggtgattcgtctggcaggtagtctcaccgcacgggctacacgcctggcccacgaagcgcagctggatgtcgccccgctggggaaaatcccgcacctgcgcacgccgggtttgctggtgatggatatggactccaccgccatccagattgaatgtattgatgaaattgccaaactggccggaacgggcgagatggtggcggaagtaaccgaacgggcgatgcgcggcgaactcgattttaccgccagcctgcgcagccgtgtggcgacgctgaaaggcgctgacgccaatattctgcaacaggtgcgtgaaaatctgccgctgatgccaggcttaacgcaactggtgctcaagctggaaacgctgggctggaaagtggcgattgcctccggcggctttactttctttgctgaatacctgcgcgacaagctgcgcctgaccgccgtggtagccaatgaactggagatcatggacggtaaatttaccggcaatgtgatcggcgacatcgtagacgcgcagtacaaagcgaaaactctgactcgcctcgcgcaggagtatgaaatcccgctggcgcagaccgtggcgattggcgatggagccaatgacctgccgatgatcaaagcggcagggctggggattgcctaccatgccaagccaaaagtgaatgaaaaggcggaagtcaccatccgtcacgctgacctgatgggggtattctgcatcctcagtggcagcctgaatcagaagtaattgctcgcccgccatcctgcgggcggcacagcattaacgaggtacaccgtggcaaaagctccaaaacgcgcctttgtttgtaatgaatgcggggccgattatccgcgctggcaggggcagtgcagtgcctgtcatgcctggaacaccatcaccgaggtgcgtcttgctgcgagcccaatggtggcgcgtaacgagcgtctcagcggctatgccggtagcgccggggtggcaaaagtccagaaactctccgatatcagccttgaagagctgccgcgtttttccaccggatttaaagagttcgaccgcgtactaggcggcggcgtggtgccaggaagtgccattctgattggcggtaaccctggtgcggggaaatccacgctgctactgcaaacgctgtgcaaactggcccagcagatgaaaacgctgtatgtcaccggcgaagagagcctgcaacaggtggcaatgcgcgctcatcgccttggcctgccgactgacaatctcaatatgttgagcgaaaccagcatcgaacagatctgcctgattgccgaagaagagcaaccgaagctgatggtaattgacagcatccaggtgatgcatatggcggatgtacagagtagccctggtagcgtggcgcaggtgcgtgaaacggcggcttatttgacacgcttcgccaaaacgcgcggtgtggcgattgtcatggtggggcacgtaaccaaagatggtagcctggctggcccgaaagtgctggaacactgtatcgactgtagcgtgcttttggatggcgatgccgactcccgttttcgcaccttgcgcagccataaaaaccgcttcggcgcggtgaatgagctgggcgtcttcgcgatgaccgaacaggggctgcgtgaagtcagcaaccctagcgcaattttcttaagtcgcggcgatgaagtgacctccggtagcagtgtgatggtggtatgggaaggaacgcgtccactgctggtggagattcaggcgctggtcgatcacagcatgatggcgaacccacgccgcgtggcagtggggctggaacaaaaccgtctggcaatcctgctggctgtgttgcaccgtcacggtggtctgcaaatggccgatcaggatgtgtttgtgaacgtggtcggcggcgtgaaggtaaccgaaaccagtgccgacttagcgttactgctggcgatggtttccagcctgcgcgacagaccgctgccgcaggatctggtggtgtttggtgaagtcgggctggcaggggagatccgcccggtgcccagcggtcaggaacgaatctctgaagcggcgaaacacggttttcgccgggcgattgttccggcggctaacgtgccgaaaaaagcgccggaagggatgcagatttttggcgttaaaaaactctccgacgcgcttagcgtgttcgacgacttataatgagatatacggagggagatatgagcagttttgattacctgaaaactgccatcaagcaacagggctgcacgctacagcaggtagctgatgccagcggtatgaccaaagggtatttaagccagttactgaatgccaaaatcaaaagccccagcgcgcaaaagctggaggcgttgcaccgttttttggggcttgagtttccccggcagaagaaaacgatcggtgtcgtattcggtaagttctacccactgcataccggacatatctaccttatccagcgcgcctgtagccaggttgacgagctgcatatcattatgggttttgacgatacccgtgaccgcgcgttgttcgaagacagtgccatgagccagcagccgaccgtgccggatcgtctgcgttggttattgcaaacttttaaatatcagaaaaatattcgcattcatgctttcaacgaagagggcatggagccgtatccgcacggctgggatgtgtggagcaacggcatcaaaaagtttatggctgaaaaagggatccagccggatctgatctacaccagcgaagaagccgatgcgccacagtatatggaacatctggggatcgagacggtgctggtcgatccgaaacgtacctttatgagtatcagcggtgcgcagatccgcgaaaacccgttccgctactgggaatatattcctaccgaagtgaagccgttttttgtgcgtaccgtggcgatccttggcggcgagagcagcggtaaatccaccctggtaaacaaacttgccaatatcttcaacaccaccagtgcgtgggaatatggccgcgattatgtctttagtcacctcggcggtgatgagatcgcattgcagtattctgactacgataaaatcgcgctgggccacgctcaatacattgattttgcggtgaaatatgccaataaagtggcatttatcgataccgattttgtcaccactcaggcgttctgcaaaaagtacgaagggcgggaacatccgttcgtgcaggcgctgattgatgaataccgtttcgatctggtgatcctgctggagaacaacacgccgtgggtggcggatggtttacgcagcctcggcagtagcgtggatcgcaaagagttccagaacttgctggtggagatgctcgaagagaacaatatcgaatttgtgcgggttgaagaggaagattacgacagtcgtttcctgcgctgcgtggaactggtgcgggagatgatgggggagcagagataaccgtgatgaaactgctcaaaggcgaggtataaaatgagtttttttgatgagttgaaaacctctctggaagaggctgtcgagattaaacaaggtttgaaaaaacctgcacgggtgacccgccacgaaattgaggatgctaaggctgttgtagaccggaaacggtgttcacgccgcatccggcattcggtgctcaatgcctgatgcgacgcttaccgcgtcttatcaggcctacagttttacaacgtattgaaattgctggttttgtaggccggataaggcgttcgcgccgcatccggcattttacgcattacttcgcaatacgcttgtacttgatacgcttcggctccagcgcgtctgcgcccagcgtgcgtttcttgtactcttcgtactcggtaaagttaccttcgaagaactcaactttaccttcatcctggtaatccagaatgtgcgtggcgatacggtcgaggaaccaacggtcgtggctgataaccatcgcacagcccgggaactccagcagggcgttttccagcgcgcgcagggtttcgatatccaggtcgttggttggttcgtcgagcagcagcatgttgccgccaacctgcagcagcttcgccagatgcagacgaccgcgctcaccaccggagagttcaccaacgcgtttaccctgatcaacccctttaaagttaaagcggccaacgtaggcgcggcttggcatctcggtgttgccgatcttcatgatatccagcccgccggaaacttcttcccaaacggttttgctgttatccatactgtcacggaactgatcaacgctcgccagtttcaccgtttcacccaaagtgatggtgccgctgtccggctgttcctgaccagagatcatacggaacagggtgcttttacccgcaccgttcggaccgatgatcccgacgatcgctcctttcgggatgctgaagctcaggtcatcaatcagcagacgatcgccataggatttacgcaggttgctgacttccagcactttatcgcccagacgcggtccaggtggaataaacagttcgttggtttcgttacgtttctgatattcggtgctgttcagttcttcaaagcgcgccagacgtgctttacctttgctctgacggcctttagtaccttgacgtacccattccagctctttctcaatgctcttacgacgcgccgcttcttgactagcttcctgcgccaggcgctgatctttctgctccagccaggaggagtagttaccttcccacggaataccttcaccgcggtcaagttcgaggatccagcctgcaacgttatcgaggaagtaacggtcgtgggtaatcgccacaacggtgccttcgaagtcgtgcaggaagcgttccagccaggccacggattcggcatccaggtggttggtcggttcgtcgagcagcagcatgtctggtttttccagcagcaggcggcacaacgctacgcgacgacgttcaccaccggagaggttagcgattttcgcgtcccagtccggcagacgtagcgcatccgccgcacgctccagctgtacgttcagattatgaccgtcgtgagcctgaatgatctcttccagacggccttgttcagcggccagcttgtcaaaatcggcatccggatcggcgtacagcgcatacacttcatccaggcgtttcagggcgttaaccacttcactaaccgcttcttcaatggactcacgcacggtgtgttccgggttcagctgcggttcctgcggcagataaccaatcttgatgtctggctgcggacgcgcttcaccttcgatgtctttatcaatgcccgccataatgcgcagcagggtggacttacccgcgccattcagacccaggacaccaatttttgccccagggaagaaactcagagagatgtttttcaaaatatgacgtttcggcggaacaactttgccgacacgatgcatggtataaacgaattgagccacgttggacttcgcctctatgtttatcgtgataatgagttttcaaaggcgaagtgtagcctttttccccgcctaatcccagccggtcgatcaccctcgcagtaaaagtaaaaaagtgtccgtaacgtggcgtaaacggcaatgactggttagcataaatctattacgcggcatgacgctgcattgatgtatttacacttagaggatgcgcttgtggaaaaagccaaacaagttacctggcggctgttggctgccggtgtctgtctgctgacggtcagcagcgtggcgcgagccgacagtctggatgagcagcgtagtcgttacgcgcaaatcaagcaggcctgggataatcgacaaatggatgtggtcgaacaaatgatgcctggactgaaggattatccgctttatccctacctggaataccgccagatcaccgatgatctgatgaatcaaccggcggtgacggtcactaactttgttcgcgctaaccccacgcttcctcccgctcgcacgctgcaatctcgtttcgtcaatgaactggcgcggcgtgaagactggcgtggcttgttagcctttagcccggaaaagcccggaactaccgaagcgcaatgtaattactactatgcgaaatggaacaccgggcagagtgaagaagcctggcaaggggcgaaagagctgtggctaaccggcaagagccagcctaacgcctgtgacaagttatttagcgtctggcgtgcgagtggtaaacaagatccgctggcgtatttagagcgtatccgtctggcgatgaaagcgggtaacacaggcctggtaacagtgctggcagggcagatgcctgccgattaccagactatcgccagcgcaatcattagtctggcgaacaaccctaatacggtactgaccttcgcgcgtacaactggcgcgaccgattttacccgtcaaatggcggcggtggcgtttgccagtgtggcgcggcaggatgctgagaatgcacggctgatgatcccaagccttgcccaggcgcagcagcttaatgaagatcagattcaggagctgcgcgatatcgtcgcctggcgtttgatgggcaacgatgtcaccgacgagcaggcgaaatggcgcgatgacgccattatgcgcagccaatctactagccttattgaacgccgtgtacgaatggcgcttggcaccggcgatcgtcgcggcctgaatacctggctggcgcgtctgcctatggaagcgaaagagaaagatgaatggcgttactggcaggcggatttattgctggaacgcggacgtgaagctgaagcaaaagagattttgcatcaactcatgcaacagcgtggtttctacccgatggttgcagcacaacgcatcggcgaagagtatgagctgaagattgataaagcgccgcagaatgttgacagcgccctgactcaggggccggagatggcgcgcgtgcgcgagttgatgtactggaatctcgataataccgcgcgtagcgagtgggccaatctggtgaagagcaagagtaaaacagagcaggctcaactggcgcggtatgctttcaacaaccaatggtgggatcttagcgttcaggcaacgatcgccgggaagctgtgggatcatctggaagagcgattcccgctggcttacaacgatcttttcaaacgctacaccagcggtaaggagatcccgcaaagctatgcgatggcgattgctcgtcaggagagcgcctggaatccgaaagtgaaaagtccggtaggggccagcggcttgatgcagattatgcctggtacagcgacccatacggtgaagatgttctctattcccggttatagcagtcctgggcaattgctggatccggaaacgaatatcaacattggcaccagttacctgcaatatgtttatcagcagtttggcaataatcgtattttctccagtgcagcttataacgccggaccagggcgggtgcgaacctggcttggcaacagcgccgggcgtatcgacgcagtggcatttgtcgagagtattccattctccgagacgcgcggttatgtgaagaacgtgctggcttatgacgcttactaccgctatttcatgggggataaaccgacgttgatgagcgccacggaatggggacgtcgttactgatccgcacgtttatgatatgctatcgtactctttagcgagtacaaccgggggaggcattttgcttcccccgctaacaatggcgacatattatggcccaacaaagtccctatagtgcagcgatggcagaacagcgtcaccaggagtggttacgttttgtcgacctgcttaagaatgcctaccaaaacgatctccatttaccgttgttaaacctgatgctgacgccagatgagcgcgaagcgttggggactcgcgtgcgtattgtcgaagagctgttgcgcggcgaaatgagccagcgtgagttaaaaaatgaactcggcgcaggcatcgcgacgattacgcgtggatctaacagcctgaaagccgcgcccgtcgagctgcgccagtggctggaagaggtgttgctgaaaagcgattgattttgtaggcctgataagacgtggcgcatcaggcatcgtgcaccgaatgccggatgcggcgtgaacgccttatccgtcctacaaatacccgtaatttcaatatgtttggtaggcatgataagacgcggcagcgtcgcatcaggcgcttaatacacggcattatgaaacggactcagcgccaggatcaccgcctggtgatagacgctggcgcgagtgagtttcccggcggtaaacacgccgatcgccccttccttacgaccaatctcatcaataccggtataacggctcatcacgggaccaagcgcctcaccttcacgcactttttccagaatcaccgcaggcaacggcaaagtagcgctacgcgcctcgccgcgctggctggcgttttcaatcaccacccaactgaaagtgctgtcaccatcgatgccagcttcaatcgccacccaaaaatcagcctctggaagtaaacggcgggcattggctacccgatttcgtgcgccagcgcgcgtttcctcactgccaaagggctgttccggtacaccgctctcgacggcaacggatgcaatatggcaggatccttcgccgaagatctcgtgaaatgcctgcagaatggcctgaattttagcgggattggtggtcgcacagacaacttggtgcataatcagcattactcagaaaattaacgttacagcagtatacggaaaaaaagcatgttacaggtatacctagtccgccacggtgaaacgcagtggaacgccgagcgacgtattcagggccagtctgacagcccgctgaccgccaaaggtgagcaacaggcgatgcaggtggcaacccgtgccaaagagcttggcattacgcatatcatcagtagcgatttaggacgcacccggcgtacggcggaaatcatcgcccaggcctgcggctgtgacatcatctttgattctcgcctgcgtgaattaaacatgggtgtgctggaaaaaagacatatcgattctctgaccgaagaagaagagaactggcgtcggcagctggtcaatggcaccgttgacgggcgtattcctgaaggcgagagtatgcaggagctcagcgatcgcgtcaatgcggcactggaatcttgccgggacttaccgcagggaagccgaccgctgctggtgagtcatggtattgcactgggatgcctggtgagtacgattctcggattaccagcatgggcagagcgccgcttacgtctgcgtaactgttctattagccgcgtggattatcaggaaagcctgtggctggcgtctggctgggtcgttgaaaccgcaggggacatcagccatctggacgcccctgcattagatgagctgcagcgttaacgacggatcggaatcagcagttcacagcgtagattaattgggcgatctcccgctttggcatcttctgccgggtagtatcgctcaatatcctgacctttacggcgcgtcaggttgagcattggcatgcacgttccgtataccgtcaggataaactcctgcacgccggttcccagaccttcataggtaaacatcacatattcgccgccctgcagcatcaccggatgccccgtcagtacatagccatctgcctgatcctgggctaacgcggtggtatagaatacctcttgctcgtcgtctttatcctgactcggacgcgtttcattcaggccgtagagcaccggcggaatggtcggcgcgttgccgagaaaatcgtgccagaactgataacgcatttcatggcggaaatcagagatttgctccaggctacaggagtagctctgggtaacaccaatcagcggcgtatcttccagggtgacaaatttgtgctctggcatagtgaattcacccaggcgtagcggcgggcgaataccaaaggcgctccattcaggagaacggcggtaaagtgcaggagtctgggcaaactgcttcttgaatgcgcgggtaaatgtctgttgagagtcgaagcggtattgcagcgcgatgtccagaatcggacgcgcagtcaggcgtagtgcgaccgcgcttttgctcaaacgacgagcacgaatatacgcgccaatagcatggccagtgacatctttaaacattctctgtaagtgccacttggaataacctgctttcgccgctacattgtcgaggctcaggggctgatccagatgaccttccagccagattaaaaggtcgcgaataatgccggcctgatccataaaatatcctcatcctttcaacaacgagcacctgacatcaggtaattggataatagcattttttgctgttttagcattcagtgtttttttcttagtagagtatgttttagggcttgacggaaataaaagtattgagattttgttcttaatcaatatgttatttaccgtgacgaactaattgctcgtgtaatagataaaaatggtaacaatatgaaatacaagcatttgatcctgtctttaagcctgataatgctggggccattggctcatgcagaagagattggtagcgtcgacaccgtatttaaaatgatcggcccggatcacaaaattgttgtggaagcctttgatgatcccgatgtgaaaaatgtcacctgttatgtgagccgggcgaaaaccggtggtattaaagggggattgggtctggcggaagatacctccgatgcggccatttcttgtcagcaagtcgggccgattgaactgagcgatcgtattaaaaacggcaaagctcagggcgaggtagtattcaaaaaacgcacgtccctggtctttaagagcttacaggtcgtgcgcttttatgatgccaaacgcaacgcgctcgcttatctggcttactccgacaaagttgtagaaggtagcccgaaaaacgcgattagcgcggttcctgtcatgccgtggcggcaataacagaggcgatttatgcaacgggaaacggtctggttagtggaagatgagcaagggatagccgacacgctggtctacatgttgcagcaggaaggttttgccgtcgaggtctttgagcgaggcttgccggtgctggataaagctcgcaagcaggtacccgacgtcatgattctcgatgttggtctgccggatattagcggctttgaattgtgccgccagttactggcgctccatccggcgttacctgtactgttcctgacggcccgaagtgaagaggtcgatcgcctgcttgggctggaaattggtgctgacgactacgtggctaaaccgtttagtccccgcgaagtgtgcgccagggtgcgcaccttactgcgtcgggtgaagaagttcagcacgccgtctcccgtcatccgtattggacattttgaattgaatgaacccgcggcgcagatcagctggtttgacacgccattagcgctgactcggtatgagtttttattgttgaagacgttactcaagagtccgggccgcgtctggtcccgccagcaactgatggatagcgtatgggaagatgcgcaggacacctacgatcgcaccgtcgatacccacattaaaacgctgcgtgccaagctgcgcgccatcaaccccgatcttagtccgattaatactcatcgcggcatgggatatagcctgaggggcctgtaatgcgtatcggcatgcggttgttgctgggctattttttactggtggcggtggcagcctggttcgtactggccatttttgtcaaagaagttaaaccgggcgtgcgaagagcaacggaggggacgttgatcgacaccgcaacgttgctggcggagctggcgcgtcccgatttgctctctggggacccaacgcatgggcaactggcgcaggcgtttaatcagctacaacatcgcccgtttcgcgccaatatcggtggcattaacaaagtgcgcaatgaatatcatgtctatatgaccgatgcgcagggcaaagtattgttcgatagcgcaaataaagccgttggacaggattatagccgctggaatgacgtctggctaacgttgcgtggtcagtatggtgcgcgcagcacgttgcaaaatcctgccgatcccgaaagttctgtgatgtatgttgccgcaccgattatggacggcagccggcttattggcgttttgagcgtaggcaaaccgaacgcggcgatggctccggtcattaagcgtagcgagcggcgaattttatgggccagcgccattttgttggggattgcactggtgattggcgcaggcatggtttggtggatcaaccgctctattgcccggctcactcgctatgctgattccgtcactgacaataagcccgttcctctccccgatctcggtagtagcgagttgcgtaaactcgcgcaggcgctggaaagtatgcgcgtgaagctggaagggaaaaactatattgagcagtatgtttacgcattaactcatgagctaaaaagcccactggcggcgattcgtggagcggcggaaattttacgcgaaggtccgccgccggaagtggtggctcgttttactgacaacattctgacgcaaaatgcgcgtatgcaggcattggtagaaacgttactacgccaggcaagactggagaatcgtcaggaagtcgttctgactgctgttgatgtggcggcattattccgccgcgtcagcgaagcgcgcaccgtgcagttggcagaaaaaaaaatcactctgcatgttacgcccaccgaggttaacgttgctgctgaaccggcgttactggagcaggcgctgggaaatttactggataacgccatcgattttacccccgagagcggttgcatcacgctaagcgccgaagtggatcaggaacacgtcacgcttaaggtgctggataccggtagtggtattcctgactacgcgcttagtcgtatttttgaacgcttttactctttgcctcgtgcaaatgggcaaaaaagcagcggtctggggttggcgttcgtcagtgaggtcgcccgtttgtttaacggcgaagtcacgctgcgcaacgtgcaggaaggtggcgtgctggccagccttcgacttcaccgtcacttcacataacttcaaattcttcccacatagtcttcgtatcctgctgccattgcaaaggagaagactatgttgaaatcccccctgttctggaaaatgactagcctgtttggtgcagtattgctgttgttgattccgataatgctgattcggcaggtgattgtcgaacgtgctgattaccgtagcgatgtggaagatgcgattcgccaaagtaccagcgggccgcaaaaactcgttgggccgctcatcgctattcctgtgaccgagctttatacggtgcaggaagaggataaaaccgtggagcggaaacgaagttttatccatttttggttacctgagagtttgatggttgatggcaatcagaacgtggaagaacgcaagatagggatttataccggtcaggtctggcacagtgatttaacgttaaaagccgatttcgatgttagccgtcttagcgaactcaacgcgccaaatatcaccttaggcaagccatttattgtgattagcgtcggggatgcgcgtggtattggtgtggtgaaagcgcctgaagttaacggaacggcgctgaccattgaacccggcaccgggttagagcaaggcgggcagggcgtgcatatccctttacctgaaggggactggcggaagcagaacctgaagctgaatatggccctgaatttaagcggtaccggcgatctttctgtggtgcctggcgggcgtaatagcgaaatgaccttaaccagcaactggccgcatcccagttttttaggtgattttctaccagccaaacgggaagttagcgagagtggttttcaggcgcactggcaaagcagctggtttgctaataatctcggtgagcgttttgctagtggcaatgataccggctgggaaaacttcccggcgtttagcgtcgcagtaacgacgccagccgatcaataccaattaactgaccgggcgactaagtacgccattctgctgattgcactgacttttatggcgttctttgtttttgaaacgctcaccgcgcaacgtttacacccaatgcaatatttgctggtggggcttagtttggtgatgttttatttgctcttgctggcgctttctgaacataccggttttaccgtggcatggataatcgccagtctgattggggcgataatgaacggtatttatttgcaagcggtattgaaaggttggtgcaacagcatgttgtttaccctcgcgctgttgttgctggatggtgtgatgtggggactgctcaactctgccgatagcgcgctgttgttgggaaccagtgtgctggtggtggcgctggccggcatgatgtttgtgacccgtaatatcgactggtatgcgtttagtctgccgaaaatgaaagccagtaaagaagttacaacggacgatgagttacgtatctggaaataaggttgaaaaataaaaacggcgctaaaaagcgccgttttttttgacggtggtaaagccgattaatcttccagatcaccgcagaagcgataaccttcaccgtgaatggtggcgatgatttccggcgtatccggcgtagattcgaaatgtttacgaatacggcggatcgtcacgtctacagtacggtcgtgcggtttcagctcacggccggtcattttcttcagcagttcagcacgggactgaattttgcctgggttttcacagaagtgaagcatggcgcggaactcgctgcgcggcagcttgtactgctcgccatcagggccgatcaagctacggctgttgatgtccagttcccaaccattgaacttgtagctttcaacgctacgacgttcttcgctgacagtacccagattcatggtacgggacagtaggttgcgtgcacgaatcgtcagttcacgcgggttgaacggtttggtgatgtagtcatctgcaccgatttcgaggccgagaattttatcgacttcgttgtcacggccagtcaggaacatcaacgcaacattcgcctgctcgcgcagttcacgcgctaacagaagaccgttcttacccggcagattgatatccatgatcaccaggttgatgtcatattcagagaggatctgatgcatttccgcgccatctgtcgcttcgaaaacatcatagccttccgcttcgaaaatacttttcaacgtgttgcgtgttaccaactcgtcttcaacgataagaatgtgcggggtctgcatgtttgctacctaaattgccaactaaatcgaaacaggaagtacaaaagtccctgacctgcctgatgcatgctgcaaattaacatgatcggcgtaacatgactaaagtacgtaattgcgttcttgatgcactttccatcaacgtcaacaacatcattagcttggtcgtgggtactttccctcaggacccgacagtgagtaaaacggctgtcatcctaaccattttaacagcaacataacaggctaagaggggccggacacccaataaaactacgcttcgttgacatatatcaagttcaattgtagcacgttaacagtttgatgaaatcatcgtatctaaatgctagctttcgtcacattattttaataatccaactagttgcatcatacaactaataaacgtggtgaatccaattgtcgagatttattttttataaaattatcctaagtaaacagaaggatatgtagcattttttaacaactcaaccgttagtacagtcaggaaatagtttagccttttttaagctaagtaaagggctttttctgcgacttacgttaagaatttgtaaattcgcaccgcgtaataagttgacagtgatcacccggttcgcggttatttgatcaagaagagtggcaatatgcgtataacgattattctggtcgcacccgccagagcagaaaatattggggcagcggcgcgggcaatgaaaacgatggggtttagcgatctgcggattgtcgatagtcaggcacacctggagccagccacccgctgggtcgcacatggatctggtgatattattgataatattaaagttttcccgacattggctgaaagcttacacgatgtcgatttcactgtcgccaccactgcgcgcagtcgggcgaaatatcattactacgccacgccagttgaactggtgccgctgttagaggaaaaatctagttggatgagccatgccgcgctggtgtttggtcgcgaagattccgggttgactaacgaagagttagcgttggctgacgttcttactggtgtgccgatggtggcggattatcctagcctcaatctggggcaggcggtgatggtctattgctatcaattagcaacattaatacaacaaccggcgaaaagtgatgcaacggcagaccaacatcaactgcaagctttacgcgaacgagccatgacattgctgacgactctggcagtggcagatgacataaaactggtcgactggttacaacaacgcctggggcttttagagcaacgagacacggcaatgttgcaccgtttgctgcatgatattgaaaaaaatatcaccaaataaaaaacgccttagtaagtatttttc

SEQ ID NO: 3 - DNA, 11903 bp, Artificial Sequence
  BAC for assembling synthetic genome
  misc_feature (34)..(143): n is a, c, g, or t
  misc_feature (2316)..(2378): n is a, c, g, or t
gatgcaagtgtgtcgctgtcgacaggccctaggnnnnnnnnnnnnnnnnnnnnnnnnnnnnnnnnnnnnnnnnnnnnnnnnnnnnnnnnnnnnnnnnnnnnnnnnnnnnnnnnnnnnnnnnnnnnnnnnnnnnnnnnnnnnnnactaggagcacgtgttgacaattaatcatcggcatagtatatcggcatagtataatacgacaaggtgaggaactaaaccatgaacatcaaaaagtttgcaaaacaagcaacagtattaacctttactaccgcactgctggcaggaggcgcaactcaagcgtttgcgaaagaaacgaaccaaaagccatataaggaaacatacggcatttcccatattacacgccatgatatgctgcaaatccctgaacagcaaaaaaatgaaaaatataaagttcctgagttcgattcgtccacaattaaaaatatctcttctgcaaaaggcctggacgtttgggacagctggccattacaaaacactgacggcactgtcgcaaactatcacggctaccacatcgtctttgcattagccggagatcctaaaaatgcggatgacacatcgatttacatgttctatcaaaaagtcggcgaaacttctattgacagctggaaaaacgctggccgcgtctttaaagacagcgacaaattcgatgcaaatgattctatcctaaaagaccaaacacaagaatggtcaggttcagccacatttacatctgacggaaaaatccgtttattctacactgatttctccggtaaacattacggcaaacaaacactgacaactgcacaagttaacgtatcagcatcagacagctctttgaacatcaacggtgtagaggattataaatcaatctttgacggtgacggaaaaacgtatcaaaatgtacagcagttcatcgatgaaggcaactacagctcaggcgacaaccatacgctgagagatcctcactacgtagaagataaaggccacaaatacttagtatttgaagcaaacactggaactgaagatggctaccaaggcgaagaatctttatttaacaaagcatactatggcaaaagcacatcattcttccgtcaagaaagtcaaaaacttctgcaaagcgataaaaaacgcacggctgagttagcaaacggcgctctcggtatgattgagctaaacgatgattacacactgaaaaaagtgatgaaaccgctgattgcatctaacacagtaacagatgaaattgaacgcgcgaacgtctttaaaatgaacggcaaatggtacctgttcactgactcccgcggatcaaaaatgacgattgacggcattacgtctaacgatatttacatgcttggttatgtttctaattctttaactggcccatacaagccgctgaacaaaactggccttgtgttaaaaatggatcttgatcctaacgatgtaacctttacttactcacacttcgctgtacctcaagcgaaaggaaacaatgtcgtgattacaagctatatgacaaacagaggattctacgcagacaaacaatcaacgtttgcgcctagcttcctgctgaacatcaaaggcaagaaaacatctgttgtcaaagacagcatccttgaacaaggacaattaacagttaacaaataaggaggacaatcatggagaaaaaaatcactggatataccaccgttgatatatcccaatggcatcgtaaagaacattttgaggcatttcagtcagttgctcaatgtacctataaccagaccgttcagctggatattacggcctttttaaagaccgtaaagaaaaataagcacaagttttatccggcctttattcacattcttgcccgcctgatgaatgctcatccggaattccgtatggcaatgaaagacggtgagctggtgatatgggatagtgttcacccttgttacaccgttttccatgagcaaactgaaacgttttcatcgctctggagtgaataccacgacgatttccggcagtttctacacatatattcgcaagatgtggcgtgttacggtgaaaacctggcctatttccctaaagggtttattgagaatatgtttttcgtctcagccaatccctgggtgagtttcaccagttttgatttaaacgtggccaatatggacaacttcttcgcccccgttttcaccgtgggcaaatattatacgcaaggcgacaaggtgctgatgccgctggcgattcaggttcatcatgccgtctgtgatggcttccatgtcggcagaatgcttaatgaattacaacagtactgcgatgagtggcagggcggggcgtaannnnnnnnnnnnnnnnnnnnnnnnnnnnnnnnnnnnnnnnnnnnnnnnnnnnnnnnnnnnnnncctaggaagcttaccctcactaaagggcggccgcgaagttcctattctctagaaagtataggaacttcattggcctggtgatgatggcgggatcgttgtatatttcttgacaccttttcggcatcgccctaaaattcggcgtcctcatattgtgtgaggacgttttattacgtgtttacgaagcaaaagctaaaaccaggagctatttaatggcaacagttaaccagctggtacgcaaaccacgtgctcgcaaagttgcgaaaagcaacgtgcctgcgctggaagcatgcccgcaaaaacgtggcgtatgtactcgtgtatatactaccactcctaaaaaaccgaactccgcgctgcgtaaagtatgccgtgttcgtctgactaacggtttcgaagtgacttcctacatcggtggtgaaggtcacaacctgcaggagcactccgtgatcctgatccgtggcggtcgtgttaaagacctcccgggtgttcgttaccacaccgtacgtggtgcgcttgactgctccggcgttaaagaccgtaagcaggctcgttccaagtatggcgtgaagcgtcctaaggcttaacaaacgctaaattgcctgatgcgctacgcttatcatccttagcgaaagctaaggatgtatttagaaaaataaacaaataggggttccgcgcacatttccccgaaaagtgccacctgggtccttttcatcacgtgctataaaaataattataatttaaattttttaatataaatatataaattaaaaatagaaagtaaaaaaagaaattaaagaaaaaatagtttttgttttccgaagatgtaaaagactctagggggatcgccaacaaatactaccttttatcttgctcttcctgctctcaggtattaatgccgaattgtttcatcttgtctgtgtagaagaccacacacgaaaatcctgtgattttacattttacttatcgttaatcgaatgtatatctatttaatctgcttttcttgtctaataaatatatatgtaaagtacgctttttgttgaaattttttaaacctttgtttatttttttttcttcattccgtaactcttctaccttctttatttactttctaaaatccaaatacaaaacataaaaataaataaacacagagtaaattcccaaattattccatcattaaaagatacgaggcgcgtgtaagttacaggcaagcgatccgtcctaagaaaccattattatcatgacattaacctataaaaataggcgtatcacgaggccctttcgtctcgcgcgtttcggtgatgacggtgaaaacctctgacacatgcagctcccggagacggtcacagcttgtctgtaagcggatgccgggagcagacaagcccgtcagggcgcgtcagcgggtgttggcgggtgtcggggctggcttaactatgcggcatcagagcagattgtactgagagtgcaccataccacagcttttcaattcaattcatcattttttttttattcttttttttgatttcggtttctttgaaatttttttgattcggtaatctccgaacagaaggaagaacgaaggaaggagcacagacttagattggtatatatacgcatatgtagtgttgaagaaacatgaaattgcccagtattcttaacccaactgcacagaacaaaaacctgcaggaaacgaagataaatcatgtcgaaagctacatataaggaacgtgctgctactcatcctagtcctgttgctgccaagctatttaatatcatgcacgaaaagcaaacaaacttgtgtgcttcattggatgttcgtaccaccaaggaattactggagttagttgaagcattaggtcccaaaatttgtttactaaaaacacatgtggatatcttgactgatttttccatggagggcacagttaagccgctaaaggcattatccgccaagtacaattttttactcttcgaagacagaaaatttgctgacattggtaatacagtcaaattgcagtactctgcgggtgtatacagaatagcagaatgggcagacattacgaatgcacacggtgtggtgggcccaggtattgttagcggtttgaagcaggcggcagaagaagtaacaaaggaacctagaggccttttgatgttagcagaattgtcatgcaagggctccctatctactggagaatatactaagggtactgttgacattgcgaagagcgacaaagattttgttatcggctttattgctcaaagagacatgggtggaagagatgaaggttacgattggttgattatgacacccggtgtgggtttagatgacaagggagacgcattgggtcaacagtatagaaccgtggatgatgtggtctctacaggatctgacattattattgttggaagaggactatttgcaaagggaagggatgctaaggtagagggtgaacgttacagaaaagcaggctgggaagcatatttgagaagatgcggccagcaaaactaaaaaactgtattataagtaaatgcatgtatactaaactcacgaattcgccaaaagttggcccagggcttcccggtatcaacagggacaccaggatttatttattctgcgaagtgatcttccgtcacaggtatttattcgcgataagctcatggagcggcgtaaccgtcgcacaggaaggacagagaaagcgcggatctgggaagtgacggacagaacggtcaggacctggattggggaggcggttgccgccgctgctgctgacggtgtgacgttctctgttccggtcacaccacatacgttccgccattcctatgcgatgcacatgctgtatgccggtataccgctgaaagttctgcaaagcctgatgggacataagtccatcagttcaacggaagtctacacgaaggtttttgcgctggatgtggctgcccgagtgccacctgacgtcggtgcctaatgagtgagctaacttacattaattgcgttgcgctcatctgttacgccggcggtagccggccagcctcgcagagcaggattcccgttgagcaccgccaggtgcgaataagggacagtgaagaaggaacacccgctcgcgggtgggcctacttcacctatcctgcccggctgacgccgttggatacaccaaggaaagtctacacgaaccctttggcaaaatcctgtatatcgtgcgaaaaaggatggatataccgaaaaaatcgctataatgaccccgaagcagggttatgcagcggaaaagcgcttgttgacaattaggggatgttgtctacatggctctgctgtagtgagtgggttgcgctccggcagcggtcctgatcagccaatcgactggcgagcggcatcgcattcttcgcatcccgcctctggcggatgcaggaagatcaacggatctcggcccagttgacccagggctgtcgccacaatgtcgcgggagcggatcaaccgagcaaaggcatgaccgactggaccttccttctgaaggctcttctccttgagccacctgtccgccaaggcaaagcgctcacagcagtggtcattctcgagataatcgacgcgtaccaacttgccatcctgaagaatggtgcagtgtctcggcaccccatagggaacctttgccatcaactcggcaagatgcagcgtcgtgttggcatcgtgtcccacgccgaggagaagtacctgcccatcgagttcatggacacgggcgaccgggcttgcaggcgagtgaggtggcaggggcaatggatcagagatgatctgctctgcctgtggccccgctgccgcaaaggcaaatggatgggcgctgcgctttacatttggcaggcgccagaatgtgtcagagacaactccaaggtccggtgtaacgggcgacgtggcaggatcgaacggctcgtcgtccagacctgaccacgagggcatgacgagcgtccctcccggacccagcgcagcacgcagggcctcgatcagtccaagtggcccatcttcgaggggccggacgctacggaaggagctgtggaccagcagcacaccgccgggggtaaccccaaggttgagaagctgaccgatgagctcggcttttcgccattcgtattgcacgacattgcactccaccgctgatgacatcagtcgatcatagcacgatcaacggcactgttgcaaatagtcggtggtgataaacttatcatccccttttgctgatggagctgcacatgaacccattcaaaggccggcattttcagcgtgacatcattctgtgggccgtacgctggtactgcaaataccggcatcagttaccgtgagctgcaggtcgtcggatcctttagtgagggttaattgcggccgcgaattcttgaagacgaaagggcctcgtgatacgactcgtccgagggcaaaggaataagatccaaactcgagtaaggatcgcaccgggtgcagtttgcgatgccggagtctgatgcggttgcgatgctgaaacaattatcctgagaataaatgccttggcctttatatggaaatgtggaactgagtggatatgctgtttttgtctgttaaacagagaagctggctgttatccactgagaagcgaacgaaacagtcgggaaaatctcccattatcgtagagatccgcattattaatctcaggagcctgtgtagcgtttataggaagtagtgttctgtcatgatgcctgcaagcggtaacgaaaacgatttgaatatgccttcaggaacaatagaaatcttcgtgcggtgttacgttgaagtggagcggattatgtcagcaatggacagaacaacctaatgaacacagaaccatgatgtggtctgtccttttacagccagtagtgctcgccgcagtcgagcgacagggcgaagccctcgagtgagcgaggaagcaccagggaacagcacttatatattctgcttacacacgatgcctgaaaaaacttcccttggggttatccacttatccacggggatatttttataattattttttttatagtttttagatcttcttttttagagcgccttgtaggcctttatccatgctggttctagagaaggtgttgtgacaaattgccctttcagtgtgacaaatcaccctcaaatgacagtcctgtctgtgacaaattgcccttaaccctgtgacaaattgccctcagaagaagctgttttttcacaaagttatccctgcttattgactcttttttatttagtgtgacaatctaaaaacttgtcacacttcacatggatctgtcatggcggaaacagcggttatcaatcacaagaaacgtaaaaatagcccgcgaatcgtccagtcaaacgacctcactgaggcggcatatagtctctcccgggatcaaaaacgtatgctgtatctgttcgttgaccagatcagaaaatctgatggcaccctacaggaacatgacggtatctgcgagatccatgttgctaaatatgctgaaatattcggattgacctctgcggaagccagtaaggatatacggcaggcattgaagagtttcgcggggaaggaagtggttttttatcgccctgaagaggatgccggcgatgaaaaaggctatgaatcttttccttggtttatcaaacgtgcgcacagtccatccagagggctttacagtgtacatatcaacccatatctcattcccttctttatcgggttacagaaccggtttacgcagtttcggcttagtgaaacaaaagaaatcaccaatccgtatgccatgcgtttatacgaatccctgtgtcagtatcgtaagccggatggctcaggcatcgtctctctgaaaatcgactggatcatagagcgttaccagctgcctcaaagttaccagcgtatgcctgacttccgccgccgcttcctgcaggtctgtgttaatgagatcaacagcagaactccaatgcgcctctcatacattgagaaaaagaaaggccgccagacgactcatatcgtattttccttccgcgatatcacttccatgacgacaggatagtctgagggttatctgtcacagatttgagggtggttcgtcacatttgttctgacctactgagggtaatttgtcacagttttgctgtttccttcagcctgcatggattttctcatactttttgaactgtaatttttaaggaagccaaatttgagggcagtttgtcacagttgatttccttctctttcccttcgtcatgtgacctgatatcgggggttagttcgtcatcattgatgagggttgattatcacagtttattactctgaattggctatccgcgtgtgtacctctacctggagtttttcccacggtggatatttcttcttgcgctgagcgtaagagctatctgacagaacagttcttctttgcttcctcgccagttcgctcgctatgctcggttacacggctgcggcgagcgctagtgataataagtgactgaggtatgtgctcttcttatctccttttgtagtgttgctcttattttaaacaactttgcggttttttgatgactttgcgattttgttgttgctttgcagtaaattgcaagatttaataaaaaaacgcaaagcaatgattaaaggatgttcagaatgaaactcatggaaacacttaaccagtgcataaacgctggtcatgaaatgacgaaggctatcgccattgcacagtttaatgatgacagcccggaagcgaggaaaataacccggcgctggagaataggtgaagcagcggatttagttggggtttcttctcaggctatcagagatgccgagaaagcagggcgactaccgcacccggatatggaaattcgaggacgggttgagcaacgtgttggttatacaattgaacaaattaatcatatgcgtgatgtgtttggtacgcgattgcgacgtgctgaagacgtatttccaccggtgatcggggttgctgcccataaaggtggcgtttacaaaacctcagtttctgttcatcttgctcaggatctggctctgaaggggctacgtgttttgctcgtggaaggtaacgacccccagggaacagcctcaatgtatcacggatgggtaccagatcttcatattcatgcagaagacactctcctgcctttctatcttggggaaaaggacgatgtcacttatgcaataaagcccacttgctggccggggcttgacattattccttcctgtctggctctgcaccgtattgaaactgagttaatgggcaaatttgatgaaggtaaactgcccaccgatccacacctgatgctccgactggccattgaaactgttgctcatgactatgatgtcatagttattgacagcgcgcctaacctgggtatcggcacgattaatgtcgtatgtgctgctgatgtgctgattgttcccacgcctgctgagttgtttgactacacctccgcactgcagtttttcgatatgcttcgtgatctgctcaagaacgttgatcttaaagggttcgagcctgatgtacgtattttgcttaccaaatacagcaatagtaatggctctcagtccccgtggatggaggagcaaattcgggatgcctggggaagcatggttctaaaaaatgttgtacgtgaaacggatgaagttggtaaaggtcagatccggatgagaactgtttttgaacaggccattgatcaacgctcttcaactggtgcctggagaaatgctctttctatttgggaacctgtctgcaatgaaattttcgatcgtctgattaaaccacgctgggagattagataatgaagcgtgcgcctgttattccaaaacatacgctcaatactcaaccggttgaagatacttcgttatcgacaccagctgccccgatggtggattcgttaattgcgcgcgtaggagtaatggctcgcggtaatgccattactttgcctgtatgtggtcgggatgtgaagtttactcttgaagtgctccggggtgatagtgttgagaagacctctcgggtatggtcaggtaatgaacgtgaccaggagctgcttactgaggacgcactggatgatctcatcccttcttttctactgactggtcaacagacaccggcgttcggtcgaagagtatctggtgtcatagaaattgccgatgggagtcgccgtcgtaaagctgctgcacttaccgaaagtgattatcgtgttctggttggcgagctggatgatgagcagatggctgcattatccagattgggtaacgattatcgcccaacaagtgcttatgaacgtggtcagcgttatgcaagccgattgcagaatgaatttgctggaaatatttctgcgctggctgatgcggaaaatatttcacgtaagattattacccgctgtatcaacaccgccaaattgcctaaatcagttgttgctcttttttctcaccccggtgaactatctgcccggtcaggtgatgcacttcaaaaagcctttacagataaagaggaattacttaagcagcaggcatctaaccttcatgagcagaaaaaagctggggtgatatttgaagctgaagaagttatcactcttttaacttctgtgcttaaaacgtcatctgcatcaagaactagtttaagctcacgacatcagtttgctcctggagcgacagtattgtataagggcgataaaatggtgcttaacctggacaggtctcgtgttccaactgagtgtatagagaaaattgaggccattcttaaggaacttgaaaagccagcaccctgatgcgaccacgttttagtctacgtttatctgtctttacttaatgtcctttgttacaggccagaaagcataactggcctgaatattctctctgggcccactgttccacttgtatcgtcggtctgataatcagactgggaccacggtcccactcgtatcgtcggtctgattattagtctgggaccacggtcccactcgtatcgtcggtctgattattagtctgggaccacggtcccactcgtatcgtcggtctgataatcagactgggaccacggtcccactcgtatcgtcggtctgattattagtctgggaccatggtcccactcgtatcgtcggtctgattattagtctgggaccacggtcccactcgtatcgtcggtctgattattagtctggaaccacggtcccactcgtatcgtcggtctgattattagtctgggaccacggtcccactcgtatcgtcggtctgattattagtctgggaccacgatcccactcgtgttgtcggtctgattatcggtctgggaccacggtcccacttgtattgtcgatcagactatcagcgtgagactacgattccatcaatgcctgtcaagggcaagtattgacatgtcgtcgtaacctgtagaacggagtaacctcggtgtgcggttgtatgcctgctgtggattgctgctgtgtcctgcttatccacaacattttgcgcacggttatgtggacaaaatacctggttacccaggccgtgccggcacgttaaccgggctgcatcc

SEQ ID NO: 4 - DNA, 11978 bp, Artificial Sequence
  BAC for assembling synthetic genome
  misc_feature (34)..(143): n is a, c, g, or t
  misc_feature (1467)..(1529): n is a, c, g, or t
gatgcaagtgtgtcgctgtcgacaggccctaggnnnnnnnnnnnnnnnnnnnnnnnnnnnnnnnnnnnnnnnnnnnnnnnnnnnnnnnnnnnnnnnnnnnnnnnnnnnnnnnnnnnnnnnnnnnnnnnnnnnnnnnnnnnnnnctaaggcctggtgatgatggcgggatcgttgtatatttcttgacaccttttcggcatcgccctaaaattcggcgtcctcatattgtgtgaggacgttttattacgtgtttacgaagcaaaagctaaaaccaggagctatttaatggcaacagttaaccagctggtacgcaaaccacgtgctcgcaaagttgcgaaaagcaacgtgcctgcgctggaagcatgcccgcaaaaacgtggcgtatgtactcgtgtatatactaccactcctaaaaaaccgaactccgcgctgcgtaaagtatgccgtgttcgtctgactaacggtttcgaagtgacttcctacatcggtggtgaaggtcacaacctgcaggagcactccgtgatcctgatccgtggcggtcgtgttaaagacctcccgggtgttcgttaccacaccgtacgtggtgcgcttgactgctccggcgttaaagaccgtaagcaggctcgttccaagtatggcgtgaagcgtcctaaggcttaaggaggacaatcatgattgaacaagatggattgcacgcaggttctccggccgcttgggtggagaggctattcggctatgactgggcacaacagacaatcggctgctctgatgccgccgtgttccggctgtcagcgcaggggcgcccggttctttttgtcaagaccgacctgtccggtgccctgaatgaactgcaggacgaggcagcgcggctatcgtggctggccacgacgggcgttccttgcgcagctgtgctcgacgttgtcactgaagcgggaagggactggctgctattgggcgaagtgccggggcaggatctcctgtcatctcaccttgctcctgccgagaaagtatccatcatggctgatgcaatgcggcggctgcatacgcttgatccggctacctgcccattcgaccaccaagcgaaacatcgcatcgagcgagcacgtactcggatggaagccggtcttgtcgatcaggatgatctggacgaagagcatcaggggctcgcgccagccgaactgttcgccaggctcaaggcgcgcatgcccgacggcgaggatctcgtcgtgacccatggcgatgcctgcttgccgaatatcatggtggaaaatggccgcttttctggattcatcgactgtggccggctgggtgtggcggaccgctatcaggacatagcgttggctacccgtgatattgctgaagagcttggcggcgaatgggctgaccgcttcctcgtgctttacggtatcgccgctcccgattcgcagcgcatcgccttctatcgccttcttgacgagttcttctgannnnnnnnnnnnnnnnnnnnnnnnnnnnnnnnnnnnnnnnnnnnnnnnnnnnnnnnnnnnnnncctaggaagcttgagcacgtgttgacaattaatcatcggcatagtatatcggcatagtataatacgacaaggtgaggaactaaaccatgaacatcaaaaagtttgcaaaacaagcaacagtattaacctttactaccgcactgctggcaggaggcgcaactcaagcgtttgcgaaagaaacgaaccaaaagccatataaggaaacatacggcatttcccatattacacgccatgatatgctgcaaatccctgaacagcaaaaaaatgaaaaatataaagttcctgagttcgattcgtccacaattaaaaatatctcttctgcaaaaggcctggacgtttgggacagctggccattacaaaacactgacggcactgtcgcaaactatcacggctaccacatcgtctttgcattagccggagatcctaaaaatgcggatgacacatcgatttacatgttctatcaaaaagtcggcgaaacttctattgacagctggaaaaacgctggccgcgtctttaaagacagcgacaaattcgatgcaaatgattctatcctaaaagaccaaacacaagaatggtcaggttcagccacatttacatctgacggaaaaatccgtttattctacactgatttctccggtaaacattacggcaaacaaacactgacaactgcacaagttaacgtatcagcatcagacagctctttgaacatcaacggtgtagaggattataaatcaatctttgacggtgacggaaaaacgtatcaaaatgtacagcagttcatcgatgaaggcaactacagctcaggcgacaaccatacgctgagagatcctcactacgtagaagataaaggccacaaatacttagtatttgaagcaaacactggaactgaagatggctaccaaggcgaagaatctttatttaacaaagcatactatggcaaaagcacatcattcttccgtcaagaaagtcaaaaacttctgcaaagcgataaaaaacgcacggctgagttagcaaacggcgctctcggtatgattgagctaaacgatgattacacactgaaaaaagtgatgaaaccgctgattgcatctaacacagtaacagatgaaattgaacgcgcgaacgtctttaaaatgaacggcaaatggtacctgttcactgactcccgcggatcaaaaatgacgattgacggcattacgtctaacgatatttacatgcttggttatgtttctaattctttaactggcccatacaagccgctgaacaaaactggccttgtgttaaaaatggatcttgatcctaacgatgtaacctttacttactcacacttcgctgtacctcaagcgaaaggaaacaatgtcgtgattacaagctatatgacaaacagaggattctacgcagacaaacaatcaacgtttgcgcctagcttcctgctgaacatcaaaggcaagaaaacatctgttgtcaaagacagcatccttgaacaaggacaattaacagttaacaaataacaaacgctaaattgcctgatgcgctacgcttatcatccttagcgaaagctaaggatgtatttagaaaaataaacaaataggggttccgcgcacatttccccgaaaagtgccacctgggtccttttcatcacgtgctataaaaataattataatttaaattttttaatataaatatataaattaaaaatagaaagtaaaaaaagaaattaaagaaaaaatagtttttgttttccgaagatgtaaaagactctagggggatcgccaacaaatactaccttttatcttgctcttcctgctctcaggtattaatgccgaattgtttcatcttgtctgtgtagaagaccacacacgaaaatcctgtgattttacattttacttatcgttaatcgaatgtatatctatttaatctgcttttcttgtctaataaatatatatgtaaagtacgctttttgttgaaattttttaaacctttgtttatttttttttcttcattccgtaactcttctaccttctttatttactttctaaaatccaaatacaaaacataaaaataaataaacacagagtaaattcccaaattattccatcattaaaagatacgaggcgcgtgtaagttacaggcaagcgatccgtcctaagaaaccattattatcatgacattaacctataaaaataggcgtatcacgaggccctttcgtctcgcgcgtttcggtgatgacggtgaaaacctctgacacatgcagctcccggagacggtcacagcttgtctgtaagcggatgccgggagcagacaagcccgtcagggcgcgtcagcgggtgttggcgggtgtcggggctggcttaactatgcggcatcagagcagattgtactgagagtgcaccataccacagcttttcaattcaattcatcattttttttttattcttttttttgatttcggtttctttgaaatttttttgattcggtaatctccgaacagaaggaagaacgaaggaaggagcacagacttagattggtatatatacgcatatgtagtgttgaagaaacatgaaattgcccagtattcttaacccaactgcacagaacaaaaacctgcaggaaacgaagataaatcatgtcgaaagctacatataaggaacgtgctgctactcatcctagtcctgttgctgccaagctatttaatatcatgcacgaaaagcaaacaaacttgtgtgcttcattggatgttcgtaccaccaaggaattactggagttagttgaagcattaggtcccaaaatttgtttactaaaaacacatgtggatatcttgactgatttttccatggagggcacagttaagccgctaaaggcattatccgccaagtacaattttttactcttcgaagacagaaaatttgctgacattggtaatacagtcaaattgcagtactctgcgggtgtatacagaatagcagaatgggcagacattacgaatgcacacggtgtggtgggcccaggtattgttagcggtttgaagcaggcggcagaagaagtaacaaaggaacctagaggccttttgatgttagcagaattgtcatgcaagggctccctatctactggagaatatactaagggtactgttgacattgcgaagagcgacaaagattttgttatcggctttattgctcaaagagacatgggtggaagagatgaaggttacgattggttgattatgacacccggtgtgggtttagatgacaagggagacgcattgggtcaacagtatagaaccgtggatgatgtggtctctacaggatctgacattattattgttggaagaggactatttgcaaagggaagggatgctaaggtagagggtgaacgttacagaaaagcaggctgggaagcatatttgagaagatgcggccagcaaaactaaaaaactgtattataagtaaatgcatgtatactaaactcacgaattcgccaaaagttggcccagggcttcccggtatcaacagggacaccaggatttatttattctgcgaagtgatcttccgtcacaggtatttattcgcgataagctcatggagcggcgtaaccgtcgcacaggaaggacagagaaagcgcggatctgggaagtgacggacagaacggtcaggacctggattggggaggcggttgccgccgctgctgctgacggtgtgacgttctctgttccggtcacaccacatacgttccgccattcctatgcgatgcacatgctgtatgccggtataccgctgaaagttctgcaaagcctgatgggacataagtccatcagttcaacggaagtctacacgaaggtttttgcgctggatgtggctgcccgagtgccacctgacgtcggtgcctaatgagtgagctaacttacattaattgcgttgcgctcatctgttacgccggcggtagccggccagcctcgcagagcaggattcccgttgagcaccgccaggtgcgaataagggacagtgaagaaggaacacccgctcgcgggtgggcctacttcacctatcctgcccggctgacgccgttggatacaccaaggaaagtctacacgaaccctttggcaaaatcctgtatatcgtgcgaaaaaggatggatataccgaaaaaatcgctataatgaccccgaagcagggttatgcagcggaaaagcgcttgttgacaattaggggatgttgtctacatggctctgctgtagtgagtgggttgcgctccggcagcggtcctgatcagccaatcgactggcgagcggcatcgcattcttcgcatcccgcctctggcggatgcaggaagatcaacggatctcggcccagttgacccagggctgtcgccacaatgtcgcgggagcggatcaaccgagcaaaggcatgaccgactggaccttccttctgaaggctcttctccttgagccacctgtccgccaaggcaaagcgctcacagcagtggtcattctcgagataatcgacgcgtaccaacttgccatcctgaagaatggtgcagtgtctcggcaccccatagggaacctttgccatcaactcggcaagatgcagcgtcgtgttggcatcgtgtcccacgccgaggagaagtacctgcccatcgagttcatggacacgggcgaccgggcttgcaggcgagtgaggtggcaggggcaatggatcagagatgatctgctctgcctgtggccccgctgccgcaaaggcaaatggatgggcgctgcgctttacatttggcaggcgccagaatgtgtcagagacaactccaaggtccggtgtaacgggcgacgtggcaggatcgaacggctcgtcgtccagacctgaccacgagggcatgacgagcgtccctcccggacccagcgcagcacgcagggcctcgatcagtccaagtggcccatcttcgaggggccggacgctacggaaggagctgtggaccagcagcacaccgccgggggtaaccccaaggttgagaagctgaccgatgagctcggcttttcgccattcgtattgcacgacattgcactccaccgctgatgacatcagtcgatcatagcacgatcaacggcactgttgcaaatagtcggtggtgataaacttatcatccccttttgctgatggagctgcacatgaacccattcaaaggccggcattttcagcgtgacatcattctgtgggccgtacgctggtactgcaaataccggcatcagttaccgtgagctgcaggtcgtcggatcctttagtgagggttaattgcggccgcgaattcttgaagacgaaagggcctcgtgatacgactcgtccgagggcaaaggaataagatccaaactcgagtaaggatcgcaccgggtgcagtttgcgatgccggagtctgatgcggttgcgatgctgaaacaattatcctgagaataaatgccttggcctttatatggaaatgtggaactgagtggatatgctgtttttgtctgttaaacagagaagctggctgttatccactgagaagcgaacgaaacagtcgggaaaatctcccattatcgtagagatccgcattattaatctcaggagcctgtgtagcgtttataggaagtagtgttctgtcatgatgcctgcaagcggtaacgaaaacgatttgaatatgccttcaggaacaatagaaatcttcgtgcggtgttacgttgaagtggagcggattatgtcagcaatggacagaacaacctaatgaacacagaaccatgatgtggtctgtccttttacagccagtagtgctcgccgcagtcgagcgacagggcgaagccctcgagtgagcgaggaagcaccagggaacagcacttatatattctgcttacacacgatgcctgaaaaaacttcccttggggttatccacttatccacggggatatttttataattattttttttatagtttttagatcttcttttttagagcgccttgtaggcctttatccatgctggttctagagaaggtgttgtgacaaattgccctttcagtgtgacaaatcaccctcaaatgacagtcctgtctgtgacaaattgcccttaaccctgtgacaaattgccctcagaagaagctgttttttcacaaagttatccctgcttattgactcttttttatttagtgtgacaatctaaaaacttgtcacacttcacatggatctgtcatggcggaaacagcggttatcaatcacaagaaacgtaaaaatagcccgcgaatcgtccagtcaaacgacctcactgaggcggcatatagtctctcccgggatcaaaaacgtatgctgtatctgttcgttgaccagatcagaaaatctgatggcaccctacaggaacatgacggtatctgcgagatccatgttgctaaatatgctgaaatattcggattgacctctgcggaagccagtaaggatatacggcaggcattgaagagtttcgcggggaaggaagtggttttttatcgccctgaagaggatgccggcgatgaaaaaggctatgaatcttttccttggtttatcaaacgtgcgcacagtccatccagagggctttacagtgtacatatcaacccatatctcattcccttctttatcgggttacagaaccggtttacgcagtttcggcttagtgaaacaaaagaaatcaccaatccgtatgccatgcgtttatacgaatccctgtgtcagtatcgtaagccggatggctcaggcatcgtctctctgaaaatcgactggatcatagagcgttaccagctgcctcaaagttaccagcgtatgcctgacttccgccgccgcttcctgcaggtctgtgttaatgagatcaacagcagaactccaatgcgcctctcatacattgagaaaaagaaaggccgccagacgactcatatcgtattttccttccgcgatatcacttccatgacgacaggatagtctgagggttatctgtcacagatttgagggtggttcgtcacatttgttctgacctactgagggtaatttgtcacagttttgctgtttccttcagcctgcatggattttctcatactttttgaactgtaatttttaaggaagccaaatttgagggcagtttgtcacagttgatttccttctctttcccttcgtcatgtgacctgatatcgggggttagttcgtcatcattgatgagggttgattatcacagtttattactctgaattggctatccgcgtgtgtacctctacctggagtttttcccacggtggatatttcttcttgcgctgagcgtaagagctatctgacagaacagttcttctttgcttcctcgccagttcgctcgctatgctcggttacacggctgcggcgagcgctagtgataataagtgactgaggtatgtgctcttcttatctccttttgtagtgttgctcttattttaaacaactttgcggttttttgatgactttgcgattttgttgttgctttgcagtaaattgcaagatttaataaaaaaacgcaaagcaatgattaaaggatgttcagaatgaaactcatggaaacacttaaccagtgcataaacgctggtcatgaaatgacgaaggctatcgccattgcacagtttaatgatgacagcccggaagcgaggaaaataacccggcgctggagaataggtgaagcagcggatttagttggggtttcttctcaggctatcagagatgccgagaaagcagggcgactaccgcacccggatatggaaattcgaggacgggttgagcaacgtgttggttatacaattgaacaaattaatcatatgcgtgatgtgtttggtacgcgattgcgacgtgctgaagacgtatttccaccggtgatcggggttgctgcccataaaggtggcgtttacaaaacctcagtttctgttcatcttgctcaggatctggctctgaaggggctacgtgttttgctcgtggaaggtaacgacccccagggaacagcctcaatgtatcacggatgggtaccagatcttcatattcatgcagaagacactctcctgcctttctatcttggggaaaaggacgatgtcacttatgcaataaagcccacttgctggccggggcttgacattattccttcctgtctggctctgcaccgtattgaaactgagttaatgggcaaatttgatgaaggtaaactgcccaccgatccacacctgatgctccgactggccattgaaactgttgctcatgactatgatgtcatagttattgacagcgcgcctaacctgggtatcggcacgattaatgtcgtatgtgctgctgatgtgctgattgttcccacgcctgctgagttgtttgactacacctccgcactgcagtttttcgatatgcttcgtgatctgctcaagaacgttgatcttaaagggttcgagcctgatgtacgtattttgcttaccaaatacagcaatagtaatggctctcagtccccgtggatggaggagcaaattcgggatgcctggggaagcatggttctaaaaaatgttgtacgtgaaacggatgaagttggtaaaggtcagatccggatgagaactgtttttgaacaggccattgatcaacgctcttcaactggtgcctggagaaatgctctttctatttgggaacctgtctgcaatgaaattttcgatcgtctgattaaaccacgctgggagattagataatgaagcgtgcgcctgttattccaaaacatacgctcaatactcaaccggttgaagatacttcgttatcgacaccagctgccccgatggtggattcgttaattgcgcgcgtaggagtaatggctcgcggtaatgccattactttgcctgtatgtggtcgggatgtgaagtttactcttgaagtgctccggggtgatagtgttgagaagacctctcgggtatggtcaggtaatgaacgtgaccaggagctgcttactgaggacgcactggatgatctcatcccttcttttctactgactggtcaacagacaccggcgttcggtcgaagagtatctggtgtcatagaaattgccgatgggagtcgccgtcgtaaagctgctgcacttaccgaaagtgattatcgtgttctggttggcgagctggatgatgagcagatggctgcattatccagattgggtaacgattatcgcccaacaagtgcttatgaacgtggtcagcgttatgcaagccgattgcagaatgaatttgctggaaatatttctgcgctggctgatgcggaaaatatttcacgtaagattattacccgctgtatcaacaccgccaaattgcctaaatcagttgttgctcttttttctcaccccggtgaactatctgcccggtcaggtgatgcacttcaaaaagcctttacagataaagaggaattacttaagcagcaggcatctaaccttcatgagcagaaaaaagctggggtgatatttgaagctgaagaagttatcactcttttaacttctgtgcttaaaacgtcatctgcatcaagaactagtttaagctcacgacatcagtttgctcctggagcgacagtattgtataagggcgataaaatggtgcttaacctggacaggtctcgtgttccaactgagtgtatagagaaaattgaggccattcttaaggaacttgaaaagccagcaccctgatgcgaccacgttttagtctacgtttatctgtctttacttaatgtcctttgttacaggccagaaagcataactggcctgaatattctctctgggcccactgttccacttgtatcgtcggtctgataatcagactgggaccacggtcccactcgtatcgtcggtctgattattagtctgggaccacggtcccactcgtatcgtcggtctgattattagtctgggaccacggtcccactcgtatcgtcggtctgataatcagactgggaccacggtcccactcgtatcgtcggtctgattattagtctgggaccatggtcccactcgtatcgtcggtctgattattagtctgggaccacggtcccactcgtatcgtcggtctgattattagtctggaaccacggtcccactcgtatcgtcggtctgattattagtctgggaccacggtcccactcgtatcgtcggtctgattattagtctgggaccacgatcccactcgtgttgtcggtctgattatcggtctgggaccacggtcccacttgtattgtcgatcagactatcagcgtgagactacgattccatcaatgcctgtcaagggcaagtattgacatgtcgtcgtaacctgtagaacggagtaacctcggtgtgcggttgtatgcctgctgtggattgctgctgtgtcctgcttatccacaacattttgcgcacggttatgtggacaaaatacctggttacccaggccgtgccggcacgttaaccgggctgcatcc

SEQ ID NO: 5 - DNA, 12577 bp, Artificial Sequence
  BAC for assembling synthetic genome
  misc_feature (34)..(143): n is a, c, g, or t
  misc_feature (1467)..(1529): n is a, c, g, or t
gatgcaagtgtgtcgctgtcgacaggccctaggnnnnnnnnnnnnnnnnnnnnnnnnnnnnnnnnnnnnnnnnnnnnnnnnnnnnnnnnnnnnnnnnnnnnnnnnnnnnnnnnnnnnnnnnnnnnnnnnnnnnnnnnnnnnnnctaaggcctggtgatgatggcgggatcgttgtatatttcttgacaccttttcggcatcgccctaaaattcggcgtcctcatattgtgtgaggacgttttattacgtgtttacgaagcaaaagctaaaaccaggagctatttaatggcaacagttaaccagctggtacgcaaaccacgtgctcgcaaagttgcgaaaagcaacgtgcctgcgctggaagcatgcccgcaaaaacgtggcgtatgtactcgtgtatatactaccactcctaaaaaaccgaactccgcgctgcgtaaagtatgccgtgttcgtctgactaacggtttcgaagtgacttcctacatcggtggtgaaggtcacaacctgcaggagcactccgtgatcctgatccgtggcggtcgtgttaaagacctcccgggtgttcgttaccacaccgtacgtggtgcgcttgactgctccggcgttaaagaccgtaagcaggctcgttccaagtatggcgtgaagcgtcctaaggcttaaggaggacaatcatgattgaacaagatggattgcacgcaggttctccggccgcttgggtggagaggctattcggctatgactgggcacaacagacaatcggctgctctgatgccgccgtgttccggctgtcagcgcaggggcgcccggttctttttgtcaagaccgacctgtccggtgccctgaatgaactgcaggacgaggcagcgcggctatcgtggctggccacgacgggcgttccttgcgcagctgtgctcgacgttgtcactgaagcgggaagggactggctgctattgggcgaagtgccggggcaggatctcctgtcatctcaccttgctcctgccgagaaagtatccatcatggctgatgcaatgcggcggctgcatacgcttgatccggctacctgcccattcgaccaccaagcgaaacatcgcatcgagcgagcacgtactcggatggaagccggtcttgtcgatcaggatgatctggacgaagagcatcaggggctcgcgccagccgaactgttcgccaggctcaaggcgcgcatgcccgacggcgaggatctcgtcgtgacccatggcgatgcctgcttgccgaatatcatggtggaaaatggccgcttttctggattcatcgactgtggccggctgggtgtggcggaccgctatcaggacatagcgttggctacccgtgatattgctgaagagcttggcggcgaatgggctgaccgcttcctcgtgctttacggtatcgccgctcccgattcgcagcgcatcgccttctatcgccttcttgacgagttcttctgannnnnnnnnnnnnnnnnnnnnnnnnnnnnnnnnnnnnnnnnnnnnnnnnnnnnnnnnnnnnnncctaggaagcttgagcacgtgttgacaattaatcatcggcatagtatatcggcatagtataatacgacaaggtgaggaactaaaccatgtcacatctcgcagaactggttgccagtgcgaaggcggccattagccaggcgtcagatgttgccgcgttagataatgtgcgcgtcgaatatttgggtaaaaaagggcacttaacccttcagatgacgaccctgcgtgagctgccgccagaagagcgtccggcagctggtgcggttatcaacgaagcgaaagagcaggttcagcaggcgctgaatgcgcgtaaagcggaactggaaagcgctgcactgaatgcgcgtctggcggcggaaacgattgatgtctctctgccaggtcgtcgcattgaaaacggcggtctgcatccggttacccgtaccatcgaccgtatcgaaagtttcttcggtgagcttggctttaccgtggcaaccgggccggaaatcgaagacgattatcataacttcgatgctctgaacattcctggtcaccacccggcgcgcgctgaccacgacactttctggtttgacactacccgcctgctgcgtacccagacctctggcgtacagatccgcaccatgaaagcccagcagccaccgattcgtatcatcgcgcctggccgtgtttatcgtaacgactacgaccagactcacacgccgatgttccatcagatggaaggtctgattgttgataccaacatcagctttaccaacctgaaaggcacgctgcacgacttcctgcgtaacttctttgaggaagatttgcagattcgcttccgtccttcctacttcccgtttgccgaaccttctgcagaagtggacgtcatgggtaaaaacggtaaatggctggaagtgctgggctgcgggatggtgcatccgaacgtgttgcgtaacgttggcatcgacccggaagtttactctggtttcggcttcgggatggggatggagcgtctgactatgttgcgttacggcgtcaccgacctgcgttcattcttcgaaaacgatctgcgtttcctcaaacagtttaaataaggaggacaatcatgaaaaagcctgaactcaccgcgacgtctgtcgagaagtttctgatcgaaaagttcgacagcgtctccgacctgatgcagctctcggagggcgaagaatctcgtgctttcagcttcgatgtaggagggcgtggatatgtcctgcgggtaaatagctgcgccgatggtttctacaaagatcgttatgtttatcggcactttgcatcggccgcgctcccgattccggaagtgcttgacattggggaattcagcgagagcctgacctattgcatctcccgccgtgcacagggtgtcacgttgcaagacctgcctgaaaccgaactgcccgctgttctgcagccggtcgcggaggccatggatgcgatcgctgcggccgatcttagccagacgagcgggttcggcccattcggaccgcaaggaatcggtcaatacactacatggcgtgatttcatatgcgcgattgctgatccccatgtgtatcactggcaaactgtgatggacgacaccgtcagtgcgtccgtcgcgcaggctctcgatgagctgatgctttgggccgaggactgccccgaagtccggcacctcgtgcacgcggatttcggctccaacaatgtcctgacggacaatggccgcataacagcggtcattgactggagcgaggcgatgttcggggattcccaatacgaggtcgccaacatcttcttctggaggccgtggttggcttgtatggagcagcagacgcgctacttcgagcggaggcatccggagcttgcaggatcgccgcggctccgggcgtatatgctccgcattggtcttgaccaactctatcagagcttggttgacggcaatttcgatgatgcagcttgggcgcagggtcgatgcgacgcaatcgtccgatccggagccgggactgtcgggcgtacacaaatcgcccgcagaagcgcggccgtctggaccgatggctgtgtagaagtacttgccgatagtggaaaccgacgccccagcactcgtccgagggcaaaggaataacaaacgctaaattgcctgatgcgctacgcttatcatccttagcgaaagctaaggatgtatttagaaaaataaacaaataggggttccgcgcacatttccccgaaaagtgccacctgggtccttttcatcacgtgctataaaaataattataatttaaattttttaatataaatatataaattaaaaatagaaagtaaaaaaagaaattaaagaaaaaatagtttttgttttccgaagatgtaaaagactctagggggatcgccaacaaatactaccttttatcttgctcttcctgctctcaggtattaatgccgaattgtttcatcttgtctgtgtagaagaccacacacgaaaatcctgtgattttacattttacttatcgttaatcgaatgtatatctatttaatctgcttttcttgtctaataaatatatatgtaaagtacgctttttgttgaaattttttaaacctttgtttatttttttttcttcattccgtaactcttctaccttctttatttactttctaaaatccaaatacaaaacataaaaataaataaacacagagtaaattcccaaattattccatcattaaaagatacgaggcgcgtgtaagttacaggcaagcgatccgtcctaagaaaccattattatcatgacattaacctataaaaataggcgtatcacgaggccctttcgtctcgcgcgtttcggtgatgacggtgaaaacctctgacacatgcagctcccggagacggtcacagcttgtctgtaagcggatgccgggagcagacaagcccgtcagggcgcgtcagcgggtgttggcgggtgtcggggctggcttaactatgcggcatcagagcagattgtactgagagtgcaccataccacagcttttcaattcaattcatcattttttttttattcttttttttgatttcggtttctttgaaatttttttgattcggtaatctccgaacagaaggaagaacgaaggaaggagcacagacttagattggtatatatacgcatatgtagtgttgaagaaacatgaaattgcccagtattcttaacccaactgcacagaacaaaaacctgcaggaaacgaagataaatcatgtcgaaagctacatataaggaacgtgctgctactcatcctagtcctgttgctgccaagctatttaatatcatgcacgaaaagcaaacaaacttgtgtgcttcattggatgttcgtaccaccaaggaattactggagttagttgaagcattaggtcccaaaatttgtttactaaaaacacatgtggatatcttgactgatttttccatggagggcacagttaagccgctaaaggcattatccgccaagtacaattttttactcttcgaagacagaaaatttgctgacattggtaatacagtcaaattgcagtactctgcgggtgtatacagaatagcagaatgggcagacattacgaatgcacacggtgtggtgggcccaggtattgttagcggtttgaagcaggcggcagaagaagtaacaaaggaacctagaggccttttgatgttagcagaattgtcatgcaagggctccctatctactggagaatatactaagggtactgttgacattgcgaagagcgacaaagattttgttatcggctttattgctcaaagagacatgggtggaagagatgaaggttacgattggttgattatgacacccggtgtgggtttagatgacaagggagacgcattgggtcaacagtatagaaccgtggatgatgtggtctctacaggatctgacattattattgttggaagaggactatttgcaaagggaagggatgctaaggtagagggtgaacgttacagaaaagcaggctgggaagcatatttgagaagatgcggccagcaaaactaaaaaactgtattataagtaaatgcatgtatactaaactcacgaattcgccaaaagttggcccagggcttcccggtatcaacagggacaccaggatttatttattctgcgaagtgatcttccgtcacaggtatttattcgcgataagctcatggagcggcgtaaccgtcgcacaggaaggacagagaaagcgcggatctgggaagtgacggacagaacggtcaggacctggattggggaggcggttgccgccgctgctgctgacggtgtgacgttctctgttccggtcacaccacatacgttccgccattcctatgcgatgcacatgctgtatgccggtataccgctgaaagttctgcaaagcctgatgggacataagtccatcagttcaacggaagtctacacgaaggtttttgcgctggatgtggctgcccgagtgccacctgacgtcggtgcctaatgagtgagctaacttacattaattgcgttgcgctcatctgttacgccggcggtagccggccagcctcgcagagcaggattcccgttgagcaccgccaggtgcgaataagggacagtgaagaaggaacacccgctcgcgggtgggcctacttcacctatcctgcccggctgacgccgttggatacaccaaggaaagtctacacgaaccctttggcaaaatcctgtatatcgtgcgaaaaaggatggatataccgaaaaaatcgctataatgaccccgaagcagggttatgcagcggaaaagcgcttgttgacaattaggggatgttgtctacatggctctgctgtagtgagtgggttgcgctccggcagcggtcctgatcagccaatcgactggcgagcggcatcgcattcttcgcatcccgcctctggcggatgcaggaagatcaacggatctcggcccagttgacccagggctgtcgccacaatgtcgcgggagcggatcaaccgagcaaaggcatgaccgactggaccttccttctgaaggctcttctccttgagccacctgtccgccaaggcaaagcgctcacagcagtggtcattctcgagataatcgacgcgtaccaacttgccatcctgaagaatggtgcagtgtctcggcaccccatagggaacctttgccatcaactcggcaagatgcagcgtcgtgttggcatcgtgtcccacgccgaggagaagtacctgcccatcgagttcatggacacgggcgaccgggcttgcaggcgagtgaggtggcaggggcaatggatcagagatgatctgctctgcctgtggccccgctgccgcaaaggcaaatggatgggcgctgcgctttacatttggcaggcgccagaatgtgtcagagacaactccaaggtccggtgtaacgggcgacgtggcaggatcgaacggctcgtcgtccagacctgaccacgagggcatgacgagcgtccctcccggacccagcgcagcacgcagggcctcgatcagtccaagtggcccatcttcgaggggccggacgctacggaaggagctgtggaccagcagcacaccgccgggggtaaccccaaggttgagaagctgaccgatgagctcggcttttcgccattcgtattgcacgacattgcactccaccgctgatgacatcagtcgatcatagcacgatcaacggcactgttgcaaatagtcggtggtgataaacttatcatccccttttgctgatggagctgcacatgaacccattcaaaggccggcattttcagcgtgacatcattctgtgggccgtacgctggtactgcaaataccggcatcagttaccgtgagctgcaggtcgtcggatcctttagtgagggttaattgcggccgcgaattcttgaagacgaaagggcctcgtgatacgactcgtccgagggcaaaggaataagatccaaactcgagtaaggatcgcaccgggtgcagtttgcgatgccggagtctgatgcggttgcgatgctgaaacaattatcctgagaataaatgccttggcctttatatggaaatgtggaactgagtggatatgctgtttttgtctgttaaacagagaagctggctgttatccactgagaagcgaacgaaacagtcgggaaaatctcccattatcgtagagatccgcattattaatctcaggagcctgtgtagcgtttataggaagtagtgttctgtcatgatgcctgcaagcggtaacgaaaacgatttgaatatgccttcaggaacaatagaaatcttcgtgcggtgttacgttgaagtggagcggattatgtcagcaatggacagaacaacctaatgaacacagaaccatgatgtggtctgtccttttacagccagtagtgctcgccgcagtcgagcgacagggcgaagccctcgagtgagcgaggaagcaccagggaacagcacttatatattctgcttacacacgatgcctgaaaaaacttcccttggggttatccacttatccacggggatatttttataattattttttttatagtttttagatcttcttttttagagcgccttgtaggcctttatccatgctggttctagagaaggtgttgtgacaaattgccctttcagtgtgacaaatcaccctcaaatgacagtcctgtctgtgacaaattgcccttaaccctgtgacaaattgccctcagaagaagctgttttttcacaaagttatccctgcttattgactcttttttatttagtgtgacaatctaaaaacttgtcacacttcacatggatctgtcatggcggaaacagcggttatcaatcacaagaaacgtaaaaatagcccgcgaatcgtccagtcaaacgacctcactgaggcggcatatagtctctcccgggatcaaaaacgtatgctgtatctgttcgttgaccagatcagaaaatctgatggcaccctacaggaacatgacggtatctgcgagatccatgttgctaaatatgctgaaatattcggattgacctctgcggaagccagtaaggatatacggcaggcattgaagagtttcgcggggaaggaagtggttttttatcgccctgaagaggatgccggcgatgaaaaaggctatgaatcttttccttggtttatcaaacgtgcgcacagtccatccagagggctttacagtgtacatatcaacccatatctcattcccttctttatcgggttacagaaccggtttacgcagtttcggcttagtgaaacaaaagaaatcaccaatccgtatgccatgcgtttatacgaatccctgtgtcagtatcgtaagccggatggctcaggcatcgtctctctgaaaatcgactggatcatagagcgttaccagctgcctcaaagttaccagcgtatgcctgacttccgccgccgcttcctgcaggtctgtgttaatgagatcaacagcagaactccaatgcgcctctcatacattgagaaaaagaaaggccgccagacgactcatatcgtattttccttccgcgatatcacttccatgacgacaggatagtctgagggttatctgtcacagatttgagggtggttcgtcacatttgttctgacctactgagggtaatttgtcacagttttgctgtttccttcagcctgcatggattttctcatactttttgaactgtaatttttaaggaagccaaatttgagggcagtttgtcacagttgatttccttctctttcccttcgtcatgtgacctgatatcgggggttagttcgtcatcattgatgagggttgattatcacagtttattactctgaattggctatccgcgtgtgtacctctacctggagtttttcccacggtggatatttcttcttgcgctgagcgtaagagctatctgacagaacagttcttctttgcttcctcgccagttcgctcgctatgctcggttacacggctgcggcgagcgctagtgataataagtgactgaggtatgtgctcttcttatctccttttgtagtgttgctcttattttaaacaactttgcggttttttgatgactttgcgattttgttgttgctttgcagtaaattgcaagatttaataaaaaaacgcaaagcaatgattaaaggatgttcagaatgaaactcatggaaacacttaaccagtgcataaacgctggtcatgaaatgacgaaggctatcgccattgcacagtttaatgatgacagcccggaagcgaggaaaataacccggcgctggagaataggtgaagcagcggatttagttggggtttcttctcaggctatcagagatgccgagaaagcagggcgactaccgcacccggatatggaaattcgaggacgggttgagcaacgtgttggttatacaattgaacaaattaatcatatgcgtgatgtgtttggtacgcgattgcgacgtgctgaagacgtatttccaccggtgatcggggttgctgcccataaaggtggcgtttacaaaacctcagtttctgttcatcttgctcaggatctggctctgaaggggctacgtgttttgctcgtggaaggtaacgacccccagggaacagcctcaatgtatcacggatgggtaccagatcttcatattcatgcagaagacactctcctgcctttctatcttggggaaaaggacgatgtcacttatgcaataaagcccacttgctggccggggcttgacattattccttcctgtctggctctgcaccgtattgaaactgagttaatgggcaaatttgatgaaggtaaactgcccaccgatccacacctgatgctccgactggccattgaaactgttgctcatgactatgatgtcatagttattgacagcgcgcctaacctgggtatcggcacgattaatgtcgtatgtgctgctgatgtgctgattgttcccacgcctgctgagttgtttgactacacctccgcactgcagtttttcgatatgcttcgtgatctgctcaagaacgttgatcttaaagggttcgagcctgatgtacgtattttgcttaccaaatacagcaatagtaatggctctcagtccccgtggatggaggagcaaattcgggatgcctggggaagcatggttctaaaaaatgttgtacgtgaaacggatgaagttggtaaaggtcagatccggatgagaactgtttttgaacaggccattgatcaacgctcttcaactggtgcctggagaaatgctctttctatttgggaacctgtctgcaatgaaattttcgatcgtctgattaaaccacgctgggagattagataatgaagcgtgcgcctgttattccaaaacatacgctcaatactcaaccggttgaagatacttcgttatcgacaccagctgccccgatggtggattcgttaattgcgcgcgtaggagtaatggctcgcggtaatgccattactttgcctgtatgtggtcgggatgtgaagtttactcttgaagtgctccggggtgatagtgttgagaagacctctcgggtatggtcaggtaatgaacgtgaccaggagctgcttactgaggacgcactggatgatctcatcccttcttttctactgactggtcaacagacaccggcgttcggtcgaagagtatctggtgtcatagaaattgccgatgggagtcgccgtcgtaaagctgctgcacttaccgaaagtgattatcgtgttctggttggcgagctggatgatgagcagatggctgcattatccagattgggtaacgattatcgcccaacaagtgcttatgaacgtggtcagcgttatgcaagccgattgcagaatgaatttgctggaaatatttctgcgctggctgatgcggaaaatatttcacgtaagattattacccgctgtatcaacaccgccaaattgcctaaatcagttgttgctcttttttctcaccccggtgaactatctgcccggtcaggtgatgcacttcaaaaagcctttacagataaagaggaattacttaagcagcaggcatctaaccttcatgagcagaaaaaagctggggtgatatttgaagctgaagaagttatcactcttttaacttctgtgcttaaaacgtcatctgcatcaagaactagtttaagctcacgacatcagtttgctcctggagcgacagtattgtataagggcgataaaatggtgcttaacctggacaggtctcgtgttccaactgagtgtatagagaaaattgaggccattcttaaggaacttgaaaagccagcaccctgatgcgaccacgttttagtctacgtttatctgtctttacttaatgtcctttgttacaggccagaaagcataactggcctgaatattctctctgggcccactgttccacttgtatcgtcggtctgataatcagactgggaccacggtcccactcgtatcgtcggtctgattattagtctgggaccacggtcccactcgtatcgtcggtctgattattagtctgggaccacggtcccactcgtatcgtcggtctgataatcagactgggaccacggtcccactcgtatcgtcggtctgattattagtctgggaccatggtcccactcgtatcgtcggtctgattattagtctgggaccacggtcccactcgtatcgtcggtctgattattagtctggaaccacggtcccactcgtatcgtcggtctgattattagtctgggaccacggtcccactcgtatcgtcggtctgattattagtctgggaccacgatcccactcgtgttgtcggtctgattatcggtctgggaccacggtcccacttgtattgtcgatcagactatcagcgtgagactacgattccatcaatgcctgtcaagggcaagtattgacatgtcgtcgtaacctgtagaacggagtaacctcggtgtgcggttgtatgcctgctgtggattgctgctgtgtcctgcttatccacaacattttgcgcacggttatgtggacaaaatacctggttacccaggccgtgccggcacgttaaccgggctgcatcc

SEQ ID NO: 6 - DNA, 29 bp, Artificial Sequence
  Oligo used for amplifying
aacctataaaaataggcgtatcacgaggc

SEQ ID NO: 7 - DNA, 112 bp, Artificial Sequence
  Oligo used for amplifying
agtcccgtactctacgcgccagagggaaattcacctggcgcgtatttttgttcgcggcttagctacggctgagcacgcccctagggcctgtcgacagcgacacacttgcatc

SEQ ID NO: 8 - DNA, 29 bp, Artificial Sequence
  Oligo used for amplifying
aacctataaaaataggcgtatcacgaggc

SEQ ID NO: 9 - DNA, 116 bp, Artificial Sequence
  Oligo used for amplifying
ttttggccccgggcagtgctcgccatcctcacgtacttttgtacgctccggttgctgcgcgctggccgtgaccaaactgcctgcctagggcctgtcgacagcgacacacttgcatc

SEQ ID NO: 10 - DNA, 29 bp, Artificial Sequence
  Oligo used for amplifying
aacctataaaaataggcgtatcacgaggc

SEQ ID NO: 11 - DNA, 113 bp, Artificial Sequence
  Oligo used for amplifying
cgccgtaggtgtattggggtgaagtccctttcgcccctgcctaataaggcacgtcaggcatcggcgcacggctgtattcgcctagggcctgtcgacagcgacacacttgcatc

SEQ ID NO: 12 - DNA, 29 bp, Artificial Sequence
  Oligo used for amplifying
aacctataaaaataggcgtatcacgaggc

SEQ ID NO: 13 - DNA, 113 bp, Artificial Sequence
  Oligo used for amplifying
agcgttacgttttaacggtacggatccatccagcgtaaaccggcttccgtggtggtttggggtttatattcacacccaaccctagggcctgtcgacagcgacacacttgcatc

SEQ ID NO: 14 - DNA, 29 bp, Artificial Sequence
  Oligo used for amplifying
aacctataaaaataggcgtatcacgaggc

SEQ ID NO: 15 - DNA, 115 bp, Artificial Sequence
  Oligo used for amplifying
gtaaaaaaacatcataataattgcggcggcgcaaagcgacggttgtttaagacgggcagttgcgcgcgcacctgacgcacaccctagggcctgtcgacagcgacacacttgcatc

SEQ ID NO: 16 - DNA, 29 bp, Artificial Sequence
  Oligo used for amplifying
aacctataaaaataggcgtatcacgaggc

SEQ ID NO: 17 - DNA, 113 bp, Artificial Sequence
  Oligo used for amplifying
gaattctgatttaaaagaagaagaaaatcagcccgacaatgagaacaatatcggcaagcaatgggcaaaaaatcccttgccctagggcctgtcgacagcgacacacttgcatc

SEQ ID NO: 18 - DNA, 29 bp, Artificial Sequence
  Oligo used for amplifying
aacctataaaaataggcgtatcacgaggc

SEQ ID NO: 19 - DNA, 113 bp, Artificial Sequence
  Oligo used for amplifying
gttttcaggccttctcaagcatggcgtgcttctgcaggctctggatactcagcgttaagctcatcagacaattttcaagccctagggcctgtcgacagcgacacacttgcatc

SEQ ID NO: 20 - DNA, 29 bp, Artificial Sequence
  Oligo used for amplifying
aacctataaaaataggcgtatcacgaggc

SEQ ID NO: 21 - DNA, 113 bp, Artificial Sequence
  Oligo used for amplifying
gaatcgcccccaatcatgctaattattacgacaactgatttccccgaactacttcatttacctgattaattgttccgcttcctagggcctgtcgacagcgacacacttgcatc

SEQ ID NO: 22 - DNA, 29 bp, Artificial Sequence
  Oligo used for amplifying
aacctataaaaataggcgtatcacgaggc

SEQ ID NO: 23 - DNA, 111 bp, Artificial Sequence
  Oligo used for amplifying
ccgcaataacgcgcttccgaaataatcgttcgcgtccttcacccccggcagcgcaaaaaaataaccgccgccgataggcctagggcctgtcgacagcgacacacttgcatc

SEQ ID NO: 24 - DNA, 29 bp, Artificial Sequence
  Oligo used for amplifying
aacctataaaaataggcgtatcacgaggc

SEQ ID NO: 25 - DNA, 113 bp, Artificial Sequence
  Oligo used for amplifying
tatgaaaatcttattctcttcgcaggaggcggaatatgcccagaacgagaatagctcccaccaccgccaccaggaagctgcctagggcctgtcgacagcgacacacttgcatc

SEQ ID NO: 26 - DNA, 29 bp, Artificial Sequence
  Oligo used for amplifying
aacctataaaaataggcgtatcacgaggc

SEQ ID NO: 27 - DNA, 118 bp, Artificial Sequence
  Oligo used for amplifying
aacattaataattagtatgttgtaactaaagtcggattttttttaaaaattacaggccatcaagaccgcgaatcggtttaatggtcctagggcctgtcgacagcgacacacttgcatc

SEQ ID NO: 28 - DNA, 29 bp, Artificial Sequence
  Oligo used for amplifying
aacctataaaaataggcgtatcacgaggc

SEQ ID NO: 29 - DNA, 113 bp, Artificial Sequence
  Oligo used for amplifying
tcacctgatgaatataataagcaaatagcatagaaaataatgacaactcccccgaggggaccatttccaaagcactgcaccctagggcctgtcgacagcgacacacttgcatc

SEQ ID NO: 30 - DNA, 29 bp, Artificial Sequence
  Oligo used for amplifying
aacctataaaaataggcgtatcacgaggc

SEQ ID NO: 31 - DNA, 109 bp, Artificial Sequence
  Oligo used for amplifying
agtgcgtgctttaagagataaaaaaacgtgacactgtaacctattattgccggattgcgcgtaatcgtcaccatcccctagggcctgtcgacagcgacacacttgcatc

SEQ ID NO: 32 - DNA, 29 bp, Artificial Sequence
  Oligo used for amplifying
aacctataaaaataggcgtatcacgaggc

SEQ ID NO: 33 - DNA, 115 bp, Artificial Sequence
  Oligo used for amplifying
gtacatggcataaagtttatgtttccaggaatattgcatgtcatagtttgtttttgatcgcgattttccttagttagcgcagcctagggcctgtcgacagcgacacacttgcatc

SEQ ID NO: 34 - DNA, 29 bp, Artificial Sequence
  Oligo used for amplifying
aacctataaaaataggcgtatcacgaggc

SEQ ID NO: 35 - DNA, 114 bp, Artificial Sequence
  Oligo used for amplifying
gcaaaataattttgcaaatcgcgtcggcaacctgtggcgtggtggcattgcctttcatatcaggtgttttcggcccgtgagcctagggcctgtcgacagcgacacacttgcatc

SEQ ID NO: 36 - DNA, 29 bp, Artificial Sequence
  Oligo used for amplifying
aacctataaaaataggcgtatcacgaggc

SEQ ID NO: 37 - DNA, 113 bp, Artificial Sequence
  Oligo used for amplifying
ttgacctgtgaagcaagtatcagagctgccgtttttgcttcatacttacacccttcaacaataaaaatgagagggaatgccctagggcctgtcgacagcgacacacttgcatc

SEQ ID NO: 38 - DNA, 29 bp, Artificial Sequence
  Oligo used for amplifying
aacctataaaaataggcgtatcacgaggc

SEQ ID NO: 39 - DNA, 99 bp, Artificial Sequence
  Oligo used for amplifying
ttattctatttcttggttgaatatattctgtagttcacgattaaaaattgctattacagtttcaggcctagggcctgtcgacagcgacacacttgcatc

SEQ ID NO: 40 - DNA, 29 bp, Artificial Sequence
  Oligo used for amplifying
aacctataaaaataggcgtatcacgaggc

SEQ ID NO: 41 - DNA, 113 bp, Artificial Sequence
  Oligo used for amplifying
gcgcgttaatgatggaaggtcaatgtgaagattgatgcatcccgtcggggcatactcactggtcgctggcgcaaagccagcctagggcctgtcgacagcgacacacttgcatc

SEQ ID NO: 42 - DNA, 29 bp, Artificial Sequence
  Oligo used for amplifying
aacctataaaaataggcgtatcacgaggc

SEQ ID NO: 43 - DNA, 107 bp, Artificial Sequence
  Oligo used for amplifying
tgatgataaccagaaaggaaacgcgcgaacttgctcaaagacagctcgatatcatcgacacgcggtagcgtgaccctagggcctgtcgacagcgacacacttgcatc

SEQ ID NO: 44 - DNA, 29 bp, Artificial Sequence
  Oligo used for amplifying
aacctataaaaataggcgtatcacgaggc

SEQ ID NO: 45 - DNA, 113 bp, Artificial Sequence
  Oligo used for amplifying
cctgtttcacacaaacggtttacaaaataaccggtagattgttaccgccacatcgcgtgtttatcgcgatagcaatcgaccctagggcctgtcgacagcgacacacttgcatc

SEQ ID NO: 46 - DNA, 29 bp, Artificial Sequence
  Oligo used for amplifying
aacctataaaaataggcgtatcacgaggc

SEQ ID NO: 47 - DNA, 115 bp, Artificial Sequence
  Oligo used for amplifying
atttattaaaattcacgcagggaataatttataaaaatatatcattacaacatatatattaattttatatttatttcgcagccctagggcctgtcgacagcgacacacttgcatc

SEQ ID NO: 48 - DNA, 29 bp, Artificial Sequence
  Oligo used for amplifying
aacctataaaaataggcgtatcacgaggc

SEQ ID NO: 49 - DNA, 113 bp, Artificial Sequence
  Oligo used for amplifying
tgtgctggcattttcatcagcccctttttgccatacttcatgcagttggctggcattttcaacattgttgcagctggcagcctagggcctgtcgacagcgacacacttgcatc

SEQ ID NO: 50 - DNA, 29 bp, Artificial Sequence
  Oligo used for amplifying
aacctataaaaataggcgtatcacgaggc

SEQ ID NO: 51 - DNA, 113 bp, Artificial Sequence
  Oligo used for amplifying
tcgccgcgatagatacaacctgcggtgcaggtttcttttaccatcaccgcacttaacagcggcacaacgggtttaacctgcctagggcctgtcgacagcgacacacttgcatc

SEQ ID NO: 52 - DNA, 29 bp, Artificial Sequence
  Oligo used for amplifying
aacctataaaaataggcgtatcacgaggc

SEQ ID NO: 53 - DNA, 113 bp, Artificial Sequence
  Oligo used for amplifying
agaggtgctggttatagtggttaactgcactataaccagcaaatttaaccaaatgattgtaatgcttagccattatcttccctagggcctgtcgacagcgacacacttgcatc

SEQ ID NO: 54 - DNA, 29 bp, Artificial Sequence
  Oligo used for amplifying
aacctataaaaataggcgtatcacgaggc

SEQ ID NO: 55 - DNA, 113 bp, Artificial Sequence
  Oligo used for amplifying
gtctcaacgagatccttctcgctaaggtgggttactgctgctgtaaacgtgcttcgatggcatccattaacattccggtgcctagggcctgtcgacagcgacacacttgcatc

SEQ ID NO: 56 - DNA, 29 bp, Artificial Sequence
  Oligo used for amplifying
aacctataaaaataggcgtatcacgaggc

SEQ ID NO: 57 - DNA, 113 bp, Artificial Sequence
  Oligo used for amplifying
ctgctcattttttattattctgcttaatcaacattgctggctggcgtcgcttcaatatggcgctcttcagccgttaatcccctagggcctgtcgacagcgacacacttgcatc

SEQ ID NO: 58 - DNA, 29 bp, Artificial Sequence
  Oligo used for amplifying
aacctataaaaataggcgtatcacgaggc

SEQ ID NO: 59 - DNA, 115 bp, Artificial Sequence
  Oligo used for amplifying
cagaccgccatgcacatgctaattgcccggacaattagtgttgtttcagtttatctttatgtttggtcaactggcgtgccagcctagggcctgtcgacagcgacacacttgcatc

SEQ ID NO: 60 - DNA, 29 bp, Artificial Sequence
  Oligo used for amplifying
aacctataaaaataggcgtatcacgaggc

SEQ ID NO: 61 - DNA, 114 bp, Artificial Sequence
  Oligo used for amplifying
gtccggcatgagcaattaatgagaggtcagggtgttatgctgacggtgacggctgacgaaacctaacaggaagcacatcaccctagggcctgtcgacagcgacacacttgcatc

SEQ ID NO: 62 - DNA, 29 bp, Artificial Sequence
  Oligo used for amplifying
aacctataaaaataggcgtatcacgaggc

SEQ ID NO: 63 - DNA, 114 bp, Artificial Sequence
  Oligo used for amplifying
gaagattattcttcttcgtcgcgcagcggaacaatcagcatatcaacgtgaacggtgttgatcagctgacgtgcggaagaccctagggcctgtcgacagcgacacacttgcatc

SEQ ID NO: 64 - DNA, 29 bp, Artificial Sequence
  Oligo used for amplifying
aacctataaaaataggcgtatcacgaggc

SEQ ID NO: 65 - DNA, 113 bp, Artificial Sequence
  Oligo used for amplifying
gagagggtgggattggattacttacgacctgccagcagttccagcacttcatccacgctggtggtgtgtgccagacgctccctagggcctgtcgacagcgacacacttgcatc

SEQ ID NO: 66 - DNA, 29 bp, Artificial Sequence
  Oligo used for amplifying
aacctataaaaataggcgtatcacgaggc

SEQ ID NO: 67 - DNA, 112 bp, Artificial Sequence
  Oligo used for amplifying
tgacagtcagaatgcggcttcgtaagcgcggttacttaccaatacagaagctggagaaaatccgccccagcaggtcgtccctagggcctgtcgacagcgacacacttgcatc

SEQ ID NO: 68 - DNA, 29 bp, Artificial Sequence
  Oligo used for amplifying
aacctataaaaataggcgtatcacgaggc

SEQ ID NO: 69 - DNA, 113 bp, Artificial Sequence
  Oligo used for amplifying
gaggaaaatcataggttgccggtgtagtgccagcgtaaataacgcagcaaacgaagctgacgcttaatgcggctcggctgcctagggcctgtcgacagcgacacacttgcatc

SEQ ID NO: 70 - DNA, 29 bp, Artificial Sequence
  Oligo used for amplifying
aacctataaaaataggcgtatcacgaggc

SEQ ID NO: 71 - DNA, 114 bp, Artificial Sequence
  Oligo used for amplifying
tgaaaaatttttgtcattccttatgctccttacactgatcatcaacaccaactacctcccccttttgcctgcctccctttgcctagggcctgtcgacagcgacacacttgcatc

SEQ ID NO: 72 - DNA, 29 bp, Artificial Sequence
  Oligo used for amplifying
aacctataaaaataggcgtatcacgaggc

SEQ ID NO: 73 - DNA, 116 bp, Artificial Sequence
  Oligo used for amplifying
cttattgctgaaaaattataccaatattgctctcacccgcctcacgcaggtctgccctaaggccttttatcagctcgatatcgcctagggcctgtcgacagcgacacacttgcatc

SEQ ID NO: 74 - DNA, 29 bp, Artificial Sequence
  Oligo used for amplifying
aacctataaaaataggcgtatcacgaggc

SEQ ID NO: 75 - DNA, 116 bp, Artificial Sequence
  Oligo used for amplifying
gtttgtagatttttttaacgcttatgatcagtatcatttgcgcggtatgttgcgcaaccctttaacaacagagcttttcgctgcctagggcctgtcgacagcgacacacttgcatc

SEQ ID NO: 76 - DNA, 29 bp, Artificial Sequence
  Oligo used for amplifying
aacctataaaaataggcgtatcacgaggc

SEQ ID NO: 77 - DNA, 113 bp, Artificial Sequence
  Oligo used for amplifying
gaattacgcgtcgaacgggtcgcgcagaatcatggtttcagtacgatccggaccggtagagatgatatcgatcggcacaccctagggcctgtcgacagcgacacacttgcatc

SEQ ID NO: 78 - DNA, 29 bp, Artificial Sequence
  Oligo used for amplifying
aacctataaaaataggcgtatcacgaggc

SEQ ID NO: 79 - DNA, 114 bp, Artificial Sequence
  Oligo used for amplifying
ggcaagaattaatgctcgcgggtctggtggaactgaacgtccggataacgttcctgtgccaggcgcaggttgaccatgctgcctagggcctgtcgacagcgacacacttgcatc

SEQ ID NO: 80 - DNA, 29 bp, Artificial Sequence
  Oligo used for amplifying
aacctataaaaataggcgtatcacgaggc

SEQ ID NO: 81 - DNA, 88 bp, Artificial Sequence
  Oligo used for amplifying
ttacaccgactaatttttcccgactgttattgcgcaggcgcgcgtaaatttgctccctagggcctgtcgacagcgacacacttgcatc

SEQ ID NO: 82 - DNA, 29 bp, Artificial Sequence
  Oligo used for amplifying
aacctataaaaataggcgtatcacgaggc

SEQ ID NO: 83 - DNA, 71 bp, Artificial Sequence
  Oligo used for amplifying
gtgagccaggcgaggaacctgggtaaatatttcctgctcctagggcctgtcgacagcgacacacttgcatc

SEQ ID NO: 84 - DNA, 54 bp, Artificial Sequence
  Homology Regions and Selection Cassettes in BACs for REXER
ggcgtgctcagccgtagctaagccgcgaacaaaaatacgcgccaggtgaatttc

SEQ ID NO: 85 - DNA, 83 bp, Artificial Sequence
  Homology Regions and Selection Cassettes in BACs for REXER
ttgttgcaggcagtttggtcacggccagcgcgcagcaaccggagcgtacaaaagtacgtgaggatggcgagcactgcccgggg

SEQ ID NO: 86 - DNA, 63 bp, Artificial Sequence
  Homology Regions and Selection Cassettes in BACs for REXER
tggcaaataaaatagcctaataatccagacgattacccgtaatatgtttaatcagggctatac

SEQ ID NO: 87 - DNA, 77 bp, Artificial Sequence
  Homology Regions and Selection Cassettes in BACs for REXER
caggcagtttggtcacggccagcgcgcagcaaccggagcgtacaaaagtacgtgaggatggcgagcactgcccgggg

SEQ ID NO: 88 - DNA, 80 bp, Artificial Sequence
  Homology Regions and Selection Cassettes in BACs for REXER
tgatgagccggagaagtcgaatacagccgtgcgccgatgcctgacgtgccttattaggcaggggcgaaagggacttcacc

SEQ ID NO: 89 - DNA, 62 bp, Artificial Sequence
  Homology Regions and Selection Cassettes in BACs for REXER
cacctacggcgtttacaggtatactcgctaaaaattattcagcgggtttggaaacaaagatg

SEQ ID NO: 90 - DNA, 63 bp, Artificial Sequence
  Homology Regions and Selection Cassettes in BACs for REXER
cgaatacagccgtgcgccgatgcctgacgtgccttattaggcaggggcgaaagggacttcacc

SEQ ID NO: 91 - DNA, 89 bp, Artificial Sequence
  Homology Regions and Selection Cassettes in BACs for REXER
ataaaccccaaaccaccacggaagccggtttacgctggatggatccgtaccgttaaaacgtaacgctattcagacaatgcttttttagg

SEQ ID NO: 92 - DNA, 53 bp, Artificial Sequence
  Homology Regions and Selection Cassettes in BACs for REXER
agttggcaggggatcgtgttgtctgaattcaggaaaagcgaaatttaaaagag

SEQ ID NO: 93 - DNA, 102 bp, Artificial Sequence
  Homology Regions and Selection Cassettes in BACs for REXER
gttgggtgtgaatataaaccccaaaccaccacggaagccggtttacgctggatggatccgtaccgttaaaacgtaacgctattcagacaatgcttttttagg

SEQ ID NO: 94 - DNA, 101 bp, Artificial Sequence
  Homology Regions and Selection Cassettes in BACs for REXER
gaacgtgtgcgtcaggtgcgcgcgcaactgcccgtcttaaacaaccgtcgctttgcgccgccgcaattattatgatgtttttttactcggcgcttgattca

SEQ ID NO: 95 - DNA, 63 bp, Artificial Sequence
  Homology Regions and Selection Cassettes in BACs for REXER
tacagattgctattgtgtgcgcgcgtcgaatgaccgttaatattctctggtttttaaggcgcg

SEQ ID NO: 96 - DNA, 97 bp, Artificial Sequence
  Homology Regions and Selection Cassettes in BACs for REXER
gtgtgcgtcaggtgcgcgcgcaactgcccgtcttaaacaaccgtcgctttgcgccgccgcaattattatgatgtttttttactcggcgcttgattca

SEQ ID NO: 97 - DNA, 81 bp, Artificial Sequence
  Homology Regions and Selection Cassettes in BACs for REXER
cttgccgatattgttctcattgtcgggctgattttcttcttcttttaaatcagaattctctttaaaaaattatgggccgct

SEQ ID NO: 98 - DNA, 51 bp, Artificial Sequence
  Homology Regions and Selection Cassettes in BACs for REXER
ccataaatttttacgctcccttaacttgccctcattcccaaacctcaatcg

SEQ ID NO: 99 - DNA, 103 bp, Artificial Sequence
  Homology Regions and Selection Cassettes in BACs for REXER
gcaagggattttttgcccattgcttgccgatattgttctcattgtcgggctgattttcttcttcttttaaatcagaattctctttaaaaaattatgggccgct

SEQ ID NO: 100 - DNA, 80 bp, Artificial Sequence
  Homology Regions and Selection Cassettes in BACs for REXER
ttaacgctgagtatccagagcctgcagaagcacgccatgcttgagaaggcctgaaaactaagggggagaaagcgtctccc

SEQ ID NO: 101 - DNA, 64 bp, Artificial Sequence
  Homology Regions and Selection Cassettes in BACs for REXER
tgtttaagtttttgtaaaaatgaatttgttatctcctccactgactacgctttaagccagagtc

SEQ ID NO: 102 - DNA, 102 bp, Artificial Sequence
  Homology Regions and Selection Cassettes in BACs for REXER
gcttgaaaattgtctgatgagcttaacgctgagtatccagagcctgcagaagcacgccatgcttgagaaggcctgaaaactaagggggagaaagcgtctccc

SEQ ID NO: 103 - DNA, 90 bp, Artificial Sequence
  Homology Regions and Selection Cassettes in BACs for REXER
aagcggaacaattaatcaggtaaatgaagtagttcggggaaatcagttgtcgtaataattagcatgattgggggcgattctctgcagccc

SEQ ID NO: 104 - DNA, 59 bp, Artificial Sequence
  Homology Regions and Selection Cassettes in BACs for REXER
ctgctggggttgagtcatcttgacgtctgctttacgggcggttaaggtgcctcttgtgc

SEQ ID NO: 105 - DNA, 90 bp, Artificial Sequence; identical to SEQ ID NO: 103
  Homology Regions and Selection Cassettes in BACs for REXER

SEQ ID NO: 106 - DNA, 80 bp, Artificial Sequence
  Homology Regions and Selection Cassettes in BACs for REXER
aaggacgcgaacgattatttcggaagcgcgttattgcgggtttaatgtttttaggcggataaggcatttgtgcgcagatg

SEQ ID NO: 107 - DNA, 60 bp, Artificial Sequence
  Homology Regions and Selection Cassettes in BACs for REXER
gcgacgcttgcgcgtcttatcatgcctacaatcagtgcgggtttggtaggctggataagg

SEQ ID NO: 108 - DNA, 119 bp, Artificial Sequence
  Homology Regions and Selection Cassettes in BACs for REXER
cctatcggcggcggttatttttttgcgctgccgggggtgaaggacgcgaacgattatttcggaagcgcgttattgcgggtttaatgtttttaggcggataaggcatttgtgcgcagatg

SEQ ID NO: 109 - DNA, 101 bp, Artificial Sequence
  Homology Regions and Selection Cassettes in BACs for REXER
cagcttcctggtggcggtggtgggagctattctcgttctgggcatattccgcctcctgcgaagagaataagattttcataaggcggatagcgatacagatg

SEQ ID NO: 110 - DNA, 57 bp, Artificial Sequence
  Homology Regions and Selection Cassettes in BACs for REXER
tccgctttcacatcagaacgtatactcgacacctgctttacgggtgaaaaaaatcaa

SEQ ID NO: 111 - DNA, 101 bp, Artificial Sequence; identical to SEQ ID NO: 109
  Homology Regions and Selection Cassettes in BACs for REXER

SEQ ID NO: 112 - DNA, 80 bp, Artificial Sequence
  Homology Regions and Selection Cassettes in BACs for REXER
taaaccgattcgcggtcttgatggcctgtaatttttaaaaaaaatccgactttagttacaacatactaattattaatgtt

SEQ ID NO: 113 - DNA, 53 bp, Artificial Sequence
  Homology Regions and Selection Cassettes in BACs for REXER
tgctccggcaacgacggcgcagaaaaagcctgccaggggagaaatcgcaactg

SEQ ID NO: 114 - DNA, 85 bp, Artificial Sequence
  Homology Regions and Selection Cassettes in BACs for REXER
accattaaaccgattcgcggtcttgatggcctgtaatttttaaaaaaaatccgactttagttacaacatactaattattaatgtt

SEQ ID NO: 115 - DNA, 107 bp, Artificial Sequence
  Homology Regions and Selection Cassettes in BACs for REXER
gtgcagtgctttggaaatggtcccctcgggggagttgtcattattttctatgctatttgcttattatattcatcaggtgaatttaataaattcctaatttgaaatat

SEQ ID NO: 116 - DNA, 57 bp, Artificial Sequence
  Homology Regions and Selection Cassettes in BACs for REXER
ttaagctagtgtttaacgacgttaagatggcaatgtgcagatcatgttatcagggtg

SEQ ID NO: 117 - DNA, 107 bp, Artificial Sequence; identical to SEQ ID NO: 115
  Homology Regions and Selection Cassettes in BACs for REXER

SEQ ID NO: 118 - DNA, 80 bp, Artificial Sequence
  Homology Regions and Selection Cassettes in BACs for REXER
aggttacagtgtcacgtttttttatctcttaaagcacgcactgcttttgcggctggcctcttttgccgcaaaatagtcgc

SEQ ID NO: 119 - DNA, 59 bp, Artificial Sequence
  Homology Regions and Selection Cassettes in BACs for REXER
ttcattgcccatttctgctcatgcatcatctacacatctatccggatctgcgcactatg

SEQ ID NO: 120 - DNA, 114 bp, Artificial Sequence
  Homology Regions and Selection Cassettes in BACs for REXER
ggatggtgacgattacgcgcaatccggcaataataggttacagtgtcacgtttttttatctcttaaagcacgcactgcttttgcggctggcctcttttgccgcaaaatagtcgc

SEQ ID NO: 121 - DNA, 80 bp, Artificial Sequence
  Homology Regions and Selection Cassettes in BACs for REXER
tgacatgcaatattcctggaaacataaactttatgccatgtacccagggaaaatcatcttcagtatagtaattatgtaaa

SEQ ID NO: 122 - DNA, 58 bp, Artificial Sequence
  Homology Regions and Selection Cassettes in BACs for REXER
gagaacaatacgtacggtaacgaaattatctttcagcaaggagctgtgaaaatgtctc

SEQ ID NO: 123 - DNA, 119 bp, Artificial Sequence
  Homology Regions and Selection Cassettes in BACs for REXER
ctgcgctaactaaggaaaatcgcgatcaaaaacaaactatgacatgcaatattcctggaaacataaactttatgccatgtacccagggaaaatcatcttcagtatagtaattatgtaaa

SEQ ID NO: 124 - DNA, 80 bp, Artificial Sequence
  Homology Regions and Selection Cassettes in BACs for REXER
aaggcaatgccaccacgccacaggttgccgacgcgatttgcaaaattattttgcgttaaggtcaaaccagtttatttgaa

SEQ ID NO: 125 - DNA, 64 bp, Artificial Sequence
  Homology Regions and Selection Cassettes in BACs for REXER
cactgacgcggtttttttattcgttctttgcagtaaataacctgcgtcatttcaccttttattg

SEQ ID NO: 126 - DNA, 107 bp, Artificial Sequence
  Homology Regions and Selection Cassettes in BACs for REXER
ctcacgggccgaaaacacctgatatgaaaggcaatgccaccacgccacaggttgccgacgcgatttgcaaaattattttgcgttaaggtcaaaccagtttatttgaa

SEQ ID NO: 127 - DNA, 80 bp, Artificial Sequence
  Homology Regions and Selection Cassettes in BACs for REXER
tatgaagcaaaaacggcagctctgatacttgcttcacaggtcaacatttttttaacaatcaagtgcaattatatctctcg

SEQ ID NO: 128 - DNA, 57 bp, Artificial Sequence
  Homology Regions and Selection Cassettes in BACs for REXER
gaatgattttcacgtttactatgaaccacctttttatttccaccgtgagggattatg

SEQ ID NO: 129 - DNA, 116 bp, Artificial Sequence
  Homology Regions and Selection Cassettes in BACs for REXER
gcattccctctcatttttattgttgaagggtgtaagtatgaagcaaaaacggcagctctgatacttgcttcacaggtcaacatttttttaacaatcaagtgcaattatatctctcg

SEQ ID NO: 130 - DNA, 80 bp, Artificial Sequence
  Homology Regions and Selection Cassettes in BACs for REXER
aatagcaatttttaatcgtgaactacagaatatattcaaccaagaaatagaataatatactctaaataattcaaattggt

SEQ ID NO: 131 - DNA, 60 bp, Artificial Sequence
  Homology Regions and Selection Cassettes in BACs for REXER
cggcgcaacgtcccaatggcctggattataaatctcattatcttaattgcaacggggtcc

SEQ ID NO: 132 - DNA, 91 bp, Artificial Sequence
  Homology Regions and Selection Cassettes in BACs for REXER
cctgaaactgtaatagcaatttttaatcgtgaactacagaatatattcaaccaagaaatagaataatatactctaaataattcaaattggt

SEQ ID NO: 133 - DNA, 80 bp, Artificial Sequence
  Homology Regions and Selection Cassettes in BACs for REXER
atgccccgacgggatgcatcaatcttcacattgaccttccatcattaacgcgctctgaaaattgagagcgaccaaataaa

SEQ ID NO: 134 - DNA, 59 bp, Artificial Sequence
  Homology Regions and Selection Cassettes in BACs for REXER
aattaataagccatttttatagccgctaagatattaaaggatgtgtcaaagatgcatac

SEQ ID NO: 135 - DNA, 107 bp, Artificial Sequence
  Homology Regions and Selection Cassettes in BACs for REXER
ctggctttgcgccagcgaccagtgagtatgccccgacgggatgcatcaatcttcacattgaccttccatcattaacgcgctctgaaaattgagagcgaccaaataaa

SEQ ID NO: 136 - DNA, 80 bp, Artificial Sequence
  Homology Regions and Selection Cassettes in BACs for REXER
agctgtctttgagcaagttcgcgcgtttcctttctggttatcatcagctgtaatcttaatttcactgccggagattgcat

SEQ ID NO: 137 - DNA, 59 bp, Artificial Sequence
  Homology Regions and Selection Cassettes in BACs for REXER
gcgttatcccgccacaatgacctgatgatgtcatcatacgtaaggtcactatgaaacag

SEQ ID NO: 138 - DNA, 108 bp, Artificial Sequence
  Homology Regions and Selection Cassettes in BACs for REXER
gtcacgctaccgcgtgtcgatgatatcgagctgtctttgagcaagttcgcgcgtttcctttctggttatcatcagctgtaatcttaatttcactgccggagattgcat

SEQ ID NO: 139 - DNA, 80 bp, Artificial Sequence
  Homology Regions and Selection Cassettes in BACs for REXER
cgcgatgtggcggtaacaatctaccggttattttgtaaaccgtttgtgtgaaacaggggtggcttatgccgccccttatt

SEQ ID NO: 140 - DNA, 61 bp, Artificial Sequence
  Homology Regions and Selection Cassettes in BACs for REXER
tgcatgtcattatttcccttctgtatatagatatgctaaatccttacttccgcatattctc

SEQ ID NO: 141 - DNA, 103 bp, Artificial Sequence
  Homology Regions and Selection Cassettes in BACs for REXER
gtcgattgctatcgcgataaacacgcgatgtggcggtaacaatctaccggttattttgtaaaccgtttgtgtgaaacaggggtggcttatgccgccccttatt

SEQ ID NO: 142 - DNA, 80 bp, Artificial Sequence
  Homology Regions and Selection Cassettes in BACs for REXER
atgatatatttttataaattattccctgcgtgaattttaataaatttaatctatccctttatacgcaatacatttacttt

SEQ ID NO: 143 - DNA, 55 bp, Artificial Sequence
  Homology Regions and Selection Cassettes in BACs for REXER
ttgatgatcttaaatgtcttatttttcgtaatgtgtataacaaggaatagtgatg

SEQ ID NO: 144 - DNA, 117 bp, Artificial Sequence
  Homology Regions and Selection Cassettes in BACs for REXER
gctgcgaaataaatataaaattaatatatatgttgtaatgatatatttttataaattattccctgcgtgaattttaataaatttaatctatccctttatacgcaatacatttacttt

SEQ ID NO: 145 - DNA, 90 bp, Artificial Sequence
  Homology Regions and Selection Cassettes in BACs for REXER
caatgttgaaaatgccagccaactgcatgaagtatggcaaaaaggggctgatgaaaatgccagcacaatacgattaaattaattaaaacc

SEQ ID NO: 146 - DNA, 62 bp, Artificial Sequence
  Homology Regions and Selection Cassettes in BACs for REXER
ataaattaaacataagattttactcattgtgttttatttctcacattgatgacggtcgcatg

SEQ ID NO: 147 - DNA, 103 bp, Artificial Sequence
  Homology Regions and Selection Cassettes in BACs for REXER
ctgccagctgcaacaatgttgaaaatgccagccaactgcatgaagtatggcaaaaaggggctgatgaaaatgccagcacaatacgattaaattaattaaaacc

SEQ ID NO: 148 - DNA, 81 bp, Artificial Sequence
  Homology Regions and Selection Cassettes in BACs for REXER
gtgcggtgatggtaaaagaaacctgcaccgcaggttgtatctatcgcggcgaatgataagagtgtgtcggcggtcaatttc

SEQ ID NO: 149 - DNA, 55 bp, Artificial Sequence
  Homology Regions and Selection Cassettes in BACs for REXER
gtaacgctatgttagggtgttgtgttctggatatctggggcatgacatggaagac

SEQ ID NO: 150 - DNA, 109 bp, Artificial Sequence
  Homology Regions and Selection Cassettes in BACs for REXER
caggttaaacccgttgtgccgctgttaagtgcggtgatggtaaaagaaacctgcaccgcaggttgtatctatcgcggcgaatgataagagtgtgtcggcggtcaatttc

SEQ ID NO: 151 - DNA, 81 bp, Artificial Sequence
  Homology Regions and Selection Cassettes in BACs for REXER
aacgataatagtgaagataatggctaagcattacaatcatttggttaaatttgctggttatagtgcagttaaccactataa

SEQ ID NO: 152 - DNA, 56 bp, Artificial Sequence
  Homology Regions and Selection Cassettes in BACs for REXER
cctcttatgttttcttaaatcagcatcttaaaacagttaagagcatactataaatc

SEQ ID NO: 153 - DNA, 69 bp, Artificial Sequence
  Homology Regions and Selection Cassettes in BACs for REXER
gaagataatggctaagcattacaatcatttggttaaatttgctggttatagtgcagttaaccactataa

SEQ ID NO: 154 - DNA, 79 bp, Artificial Sequence
  Homology Regions and Selection Cassettes in BACs for REXER
gatgccatcgaagcacgtttacagcagcagtaacccaccttagcgagaaggatctcgttgagactctgagtgacagcgc

SEQ ID NO: 155 - DNA, 59 bp, Artificial Sequence
  Homology Regions and Selection Cassettes in BACs for REXER
ttccacgcatactgggcgctgttgcttttttgaaccaggaaacagaacctctgacaatg

SEQ ID NO: 156 - DNA, 95 bp, Artificial Sequence
  Homology Regions and Selection Cassettes in BACs for REXER
caccggaatgttaatggatgccatcgaagcacgtttacagcagcagtaacccaccttagcgagaaggatctcgttgagactctgagtgacagcgc

SEQ ID NO: 157 - DNA, 91 bp, Artificial Sequence
  Homology Regions and Selection Cassettes in BACs for REXER
ttaacggctgaagagcgccatattgaagcgacgccagccagcaatgttgattaagcagaataataaaaaatgagcaggcattttccctctt

SEQ ID NO: 158 - DNA, 60 bp, Artificial Sequence
  Homology Regions and Selection Cassettes in BACs for REXER
tgaggagagggaaaatagtttctgcctttatatttttataattacaacgataaaaggctg

SEQ ID NO: 159 - DNA, 94 bp, Artificial Sequence
  Homology Regions and Selection Cassettes in BACs for REXER
ggattaacggctgaagagcgccatattgaagcgacgccagccagcaatgttgattaagcagaataataaaaaatgagcaggcattttccctctt

SEQ ID NO: 160 - DNA, 85 bp, Artificial Sequence
  Homology Regions and Selection Cassettes in BACs for REXER
gaccaaacataaagataaactgaaacaacactaattgtccgggcaattagcatgtgcatggcggtctgttgtgcggcacaacggg

SEQ ID NO: 161 - DNA, 63 bp, Artificial Sequence
  Homology Regions and Selection Cassettes in BACs for REXER
gtacggttaatgctccgagcctgttccactgtttgagtgggcaggttcttaggtgaaattatg

SEQ ID NO: 162 - DNA, 99 bp, Artificial Sequence
  Homology Regions and Selection Cassettes in BACs for REXER
ctggcacgccagttgaccaaacataaagataaactgaaacaacactaattgtccgggcaattagcatgtgcatggcggtctgttgtgcggcacaacggg

SEQ ID NO: 163 - DNA, 90 bp, Artificial Sequence
  Homology Regions and Selection Cassettes in BACs for REXER
ttaggtttcgtcagccgtcaccgtcagcataacaccctgacctctcattaattgctcatgccggacggcactatcgtcgtccggcctttt

SEQ ID NO: 164 - DNA, 58 bp, Artificial Sequence
  Homology Regions and Selection Cassettes in BACs for REXER
ttcccccgctacgtgcatctatttctataaacccgctcattttgtctattttttgcac

SEQ ID NO: 165 - DNA, 105 bp, Artificial Sequence
  Homology Regions and Selection Cassettes in BACs for REXER
gtgatgtgcttcctgttaggtttcgtcagccgtcaccgtcagcataacaccctgacctctcattaattgctcatgccggacggcactatcgtcgtccggcctttt

SEQ ID NO: 166 - DNA, 81 bp, Artificial Sequence
  Homology Regions and Selection Cassettes in BACs for REXER
caccgttcacgttgatatgctgattgttccgctgcgcgacgaagaagaataatcttccctctacgacgtgttcctgaacgc

SEQ ID NO: 167 - DNA, 53 bp, Artificial Sequence
  Homology Regions and Selection Cassettes in BACs for REXER
atgcgggcgttttgctttttggcgcgccttgttacctgatcagcgtaaacacc

SEQ ID NO: 168 - DNA, 105 bp, Artificial Sequence
  Homology Regions and Selection Cassettes in BACs for REXER
gtcttccgcacgtcagctgatcaacaccgttcacgttgatatgctgattgttccgctgcgcgacgaagaagaataatcttccctctacgacgtgttcctgaacgc

SEQ ID NO: 169 - DNA, 91 bp, Artificial Sequence
  Homology Regions and Selection Cassettes in BACs for REXER
caccaccagcgtggatgaagtgctggaactgctggcaggtcgtaagtaatccaatcccaccctctccacatggagaaggtggggttaattg

SEQ ID NO: 170 - DNA, 62 bp, Artificial Sequence
  Homology Regions and Selection Cassettes in BACs for REXER
gcgctacgcttatcaggcctacaggatgcatcacaatttgttgaatttgcacgttcttgtag

SEQ ID NO: 171 - DNA, 105 bp, Artificial Sequence
  Homology Regions and Selection Cassettes in BACs for REXER
gagcgtctggcacacaccaccagcgtggatgaagtgctggaactgctggcaggtcgtaagtaatccaatcccaccctctccacatggagaaggtggggttaattg

SEQ ID NO: 172 - DNA, 81 bp, Artificial Sequence
  Homology Regions and Selection Cassettes in BACs for REXER
caccggggaatttactagtgacgacctgctggggcggattttctccagcttctgtattggtaagtaaccgcgcttacgaag

SEQ ID NO: 173 - DNA, 55 bp, Artificial Sequence
  Homology Regions and Selection Cassettes in BACs for REXER
tctgactgtcagatgcggcttcgcttcattgttaccactcctgttattcctcaac

SEQ ID NO: 174 - DNA, 62 bp, Artificial Sequence
  Homology Regions and Selection Cassettes in BACs for REXER
gacgacctgctggggcggattttctccagcttctgtattggtaagtaaccgcgcttacgaag

SEQ ID NO: 175 - DNA, 91 bp, Artificial Sequence
  Homology Regions and Selection Cassettes in BACs for REXER
agcgtcagcttcgtttgctgcgttatttacgctggcactacaccggcaacctatgattttcctctctttgtaaagcgacggagtggtcact

SEQ ID NO: 176 - DNA, 59 bp, Artificial Sequence
  Homology Regions and Selection Cassettes in BACs for REXER
cctgtctgcttttttattacacaaagcattcaaatttttaatgctttatttgccatttc

SEQ ID NO: 177 - DNA, 107 bp, Artificial Sequence
  Homology Regions and Selection Cassettes in BACs for REXER
cagccgagccgcattaagcgtcagcttcgtttgctgcgttatttacgctggcactacaccggcaacctatgattttcctctctttgtaaagcgacggagtggtcact

SEQ ID NO: 178 - DNA, 82 bp, Artificial Sequence
  Homology Regions and Selection Cassettes in BACs for REXER
gaggtagttggtgttgatgatcagtgtaaggagcataaggaatgacaaaaatttttcattcttgaatataaaaaacagatgc

SEQ ID NO: 179 - DNA, 58 bp, Artificial Sequence
  Homology Regions and Selection Cassettes in BACs for REXER
tctggtattaatacaaggctgttttacttgaacttataataactgcaactgttacatc

SEQ ID NO: 180 - DNA, 105 bp, Artificial Sequence
  Homology Regions and Selection Cassettes in BACs for REXER
caaagggaggcaggcaaaagggggaggtagttggtgttgatgatcagtgtaaggagcataaggaatgacaaaaatttttcattcttgaatataaaaaacagatgc

SEQ ID NO: 181 - DNA, 91 bp, Artificial Sequence
  Homology Regions and Selection Cassettes in BACs for REXER
ataaaaggccttagggcagacctgcgtgaggcgggtgagagcaatattggtataatttttcagcaataagaccagaaaacgtgatttaacg

SEQ ID NO: 182 - DNA, 50 bp, Artificial Sequence
  Homology Regions and Selection Cassettes in BACs for REXER
ttgtcgtacctggagtcttccctttcgccccccgtctggtctacatttgg

SEQ ID NO: 183 - DNA, 104 bp, Artificial Sequence
  Homology Regions and Selection Cassettes in BACs for REXER
cgatatcgagctgataaaaggccttagggcagacctgcgtgaggcgggtgagagcaatattggtataatttttcagcaataagaccagaaaacgtgatttaacg

SEQ ID NO: 184 - DNA, 91 bp, Artificial Sequence
  Homology Regions and Selection Cassettes in BACs for REXER
ctgttgttaaagggttgcgcaacataccgcgcaaatgatactgatcataagcgttaaaaaaatctacaaaccaacgcaacacaattcatgc

SEQ ID NO: 185 - DNA, 64 bp, Artificial Sequence
  Homology Regions and Selection Cassettes in BACs for REXER
agtatgtcacgttctcgcgtttctgaacggggaacggcgctccattgaggaagtcattcatatg

SEQ ID NO: 186 - DNA, 103 bp, Artificial Sequence
  Homology Regions and Selection Cassettes in BACs for REXER
cagcgaaaagctctgttgttaaagggttgcgcaacataccgcgcaaatgatactgatcataagcgttaaaaaaatctacaaaccaacgcaacacaattcatgc

SEQ ID NO: 187 - DNA, 92 bp, Artificial Sequence
  Homology Regions and Selection Cassettes in BACs for REXER
gatatcatctctaccggtccggatcgtactgaaaccatgattctgcgcgacccgttcgacgcgtaattctggtacgcctggcagatattttg

SEQ ID NO: 188 - DNA, 55 bp, Artificial Sequence
  Homology Regions and Selection Cassettes in BACs for REXER
gggcgaacagtgtgatacattgctgtgtcgggtaagccattacgctatccgacac

SEQ ID NO: 189 - DNA, 103 bp, Artificial Sequence
  Homology Regions and Selection Cassettes in BACs for REXER
gtgtgccgatcgatatcatctctaccggtccggatcgtactgaaaccatgattctgcgcgacccgttcgacgcgtaattctggtacgcctggcagatattttg

SEQ ID NO: 190 - DNA, 92 bp, Artificial Sequence
  Homology Regions and Selection Cassettes in BACs for REXER
ctgcgcctggcacaggaacgttatccggacgttcagttccaccagacccgcgagcattaattcttgcctccagggcgcggtagccgctgcgc

SEQ ID NO: 191 - DNA, 55 bp, Artificial Sequence
  Homology Regions and Selection Cassettes in BACs for REXER
aatttcccttccttattagccgcttacggaatgttcttaaaacattcacttttgc

SEQ ID NO: 192 - DNA, 105 bp, Artificial Sequence
  Homology Regions and Selection Cassettes in BACs for REXER
cagcatggtcaacctgcgcctggcacaggaacgttatccggacgttcagttccaccagacccgcgagcattaattcttgcctccagggcgcggtagccgctgcgc

SEQ ID NO: 193 - DNA, 78 bp, Artificial Sequence
  Homology Regions and Selection Cassettes in BACs for REXER
attcctgccgttccgctcacggaacttaaccgcgagcagaagtggcagatgatgttgagtaagagtatgcgtcgttaa

SEQ ID NO: 194 - DNA, 55 bp, Artificial Sequence
  Homology Regions and Selection Cassettes in BACs for REXER
gtcctgcttgccagatgcgatgttgtagcatcttatccagcaaccaggtcgcatc

SEQ ID NO: 195 - DNA, 147 bp, Artificial Sequence
  Homology Regions and Selection Cassettes in BACs for REXER
gagcaaatttacgcgcgcctgcgcaataacagtcgggaaaaattagtcggtgtaagaaagacgccgcgtattcctgccgttccgctcacggaacttaaccgcgagcagaagtggcagatgatgttgagtaagagtatgcgtcgttaa

SEQ ID NO: 196 - DNA, 55 bp, Artificial Sequence
  Homology Regions and Selection Cassettes in BACs for REXER
cggcgtgctcagccgtagctaagccgcgaacaaaaatacgcgccaggtgaatttc

SEQ ID NO: 197 - DNA, 50 bp, Artificial Sequence
  Homology Regions and Selection Cassettes in BACs for REXER
tcagtgggaaattgtggggcaaagtgggaataaggggtgaggctggcatg

SEQ ID NO: 198 - DNA, 152 bp, Artificial Sequence
  Homology Regions and Selection Cassettes in BACs for REXER
agcaggaaatatttacccaggttcctcgcctggctcacgcgggacatttcccctcccgggaaataaaagatgagcactttctattctgcattgccgctaagacttttcccatcacttcggggacaatatttttttatcaaaacgtcgctttg

SEQ ID NO: 199 - DNA, 48 bp, Artificial Sequence
  Homology Regions and Selection Cassettes in BACs for REXER
cgtaacgcgcgctaatacaagcatataaacctgataatgggcggttgg

SEQ ID NO: 200 - DNA, 55 bp, Artificial Sequence
  Homology Regions and Selection Cassettes in BACs for REXER
aaggcgtttacgccgcatcaggccgccagcaccgattgccggatgcgacgtaacc

SEQ ID NO: 201 - DNA, 30 bp, Artificial Sequence
  Plasmid backbones used to encode the protospacer sequences required for REXER
cgcggcttagctacggctgagcacgcccct

SEQ ID NO: 202 - DNA, 30 bp, Artificial Sequence
  Plasmid backbones used to encode the protospacer sequences required for REXER
ccgtaatatgtttaatcagggctataccct

SEQ ID NO: 203 - DNA, 30 bp, Artificial Sequence
  Plasmid backbones used to encode the protospacer sequences required for REXER
gcgcgctggccgtgaccaaactgcctgcct

SEQ ID NO: 204 - DNA, 30 bp, Artificial Sequence
  Plasmid backbones used to encode the protospacer sequences required for REXER
tattcagcgggtttggaaacaaagatgcct

SEQ ID NO: 205 - DNA, 30 bp, Artificial Sequence
  Plasmid backbones used to encode the protospacer sequences required for REXER
tcaggcatcggcgcacggctgtattcgcct

SEQ ID NO: 206 - DNA, 30 bp, Artificial Sequence
  Plasmid backbones used to encode the protospacer sequences required for REXER
attcaggaaaagcgaaatttaaaagagcct

SEQ ID NO: 207 - DNA, 30 bp, Artificial Sequence
  Plasmid backbones used to encode the protospacer sequences required for REXER
ggtttggggtttatattcacacccaaccct

SEQ ID NO: 208 - DNA, 30 bp, Artificial Sequence
  Plasmid backbones used to encode the protospacer sequences required for REXER
ttaatattctctggtttttaaggcgcgcct

SEQ ID NO: 209 - DNA, 30 bp, Artificial Sequence
  Plasmid backbones used to encode the protospacer sequences required for REXER
gcagttgcgcgcgcacctgacgcacaccct

SEQ ID NO: 210 - DNA, 30 bp, Artificial Sequence
  Plasmid backbones used to encode the protospacer sequences required for REXER
cttgccctcattcccaaacctcaatcgcct

SEQ ID NO: 211 - DNA, 30 bp, Artificial Sequence
  Plasmid backbones used to encode the protospacer sequences required for REXER
gcaagcaatgggcaaaaaatcccttgccct

SEQ ID NO: 212 - DNA, 30 bp, Artificial Sequence
  Plasmid backbones used to encode the protospacer sequences required for REXER
ccactgactacgctttaagccagagtccct

SEQ ID NO: 213 - DNA, 30 bp, Artificial Sequence
  Plasmid backbones used to encode the protospacer sequences required for REXER
gttaagctcatcagacaattttcaagccct

SEQ ID NO: 214 - DNA, 30 bp, Artificial Sequence
  Plasmid backbones used to encode the protospacer sequences required for REXER
tacgggcggttaaggtgcctcttgtgccct

SEQ ID NO: 215 - DNA, 30 bp, Artificial Sequence
  Plasmid backbones used to encode the protospacer sequences required for REXER
tcatttacctgattaattgttccgcttcct

SEQ ID NO: 216 - DNA, 30 bp, Artificial Sequence
  Plasmid backbones used to encode the protospacer sequences required for REXER
agtgcgggtttggtaggctggataaggcct

SEQ ID NO: 217 - DNA, 30 bp, Artificial Sequence
  Plasmid backbones used to encode the protospacer sequences required for REXER
cgcaaaaaaataaccgccgccgataggcct

SEQ ID NO: 218 - DNA, 30 bp, Artificial Sequence
  Plasmid backbones used to encode the protospacer sequences required for REXER
acctgctttacgggtgaaaaaaatcaacct

SEQ ID NO: 219 - DNA, 30 bp, Artificial Sequence
  Plasmid backbones used to encode the protospacer sequences required for REXER
gctcccaccaccgccaccaggaagctgcct

SEQ ID NO: 220 - DNA, 30 bp, Artificial Sequence
  Plasmid backbones used to encode the protospacer sequences required for REXER
agcctgccaggggagaaatcgcaactgcct

SEQ ID NO: 221 - DNA, 30 bp, Artificial Sequence
  Plasmid backbones used to encode the protospacer sequences required for REXER
atcaagaccgcgaatcggtttaatggtcct

SEQ ID NO: 222 - DNA, 30 bp, Artificial Sequence
  Plasmid backbones used to encode the protospacer sequences required for REXER
caatgtgcagatcatgttatcagggtgcct

SEQ ID NO: 223 - DNA, 30 bp, Artificial Sequence
  Plasmid backbones used to encode the protospacer sequences required for REXER
gaggggaccatttccaaagcactgcaccct

SEQ ID NO: 224 - DNA, 30 bp, Artificial Sequence
  Plasmid backbones used to encode the protospacer sequences required for REXER
cacatctatccggatctgcgcactatgcct

SEQ ID NO: 225 - DNA, 30 bp, Artificial Sequence
  Plasmid backbones used to encode the protospacer sequences required for REXER
ccggattgcgcgtaatcgtcaccatcccct

SEQ ID NO: 226 - DNA, 30 bp, Artificial Sequence
  Plasmid backbones used to encode the protospacer sequences required for REXER
ttcagcaaggagctgtgaaaatgtctccct

SEQ ID NO: 227 - DNA, 30 bp, Artificial Sequence
  Plasmid backbones used to encode the protospacer sequences required for REXER
gatcgcgattttccttagttagcgcagcct

SEQ ID NO: 228 - DNA, 30 bp, Artificial Sequence
  Plasmid backbones used to encode the protospacer sequences required for REXER
taacctgcgtcatttcaccttttattgcct

SEQ ID NO: 229 - DNA, 30 bp, Artificial Sequence
  Plasmid backbones used to encode the protospacer sequences required for REXER
tcatatcaggtgttttcggcccgtgagcct

SEQ ID NO: 230 - DNA, 30 bp, Artificial Sequence
  Plasmid backbones used to encode the protospacer sequences required for REXER
tttttatttccaccgtgagggattatgcct

SEQ ID NO: 231 - DNA, 30 bp, Artificial Sequence
  Plasmid backbones used to encode the protospacer sequences required for REXER
ttcaacaataaaaatgagagggaatgccct

SEQ ID NO: 232 - DNA, 30 bp, Artificial Sequence
  Plasmid backbones used to encode the protospacer sequences required for REXER
ctcattatcttaattgcaacggggtcccct

SEQ ID NO: 233 - DNA, 30 bp, Artificial Sequence
  Plasmid backbones used to encode the protospacer sequences required for REXER
attaaaaattgctattacagtttcaggcct

SEQ ID NO: 234 - DNA, 30 bp, Artificial Sequence
  Plasmid backbones used to encode the protospacer sequences required for REXER
attaaaggatgtgtcaaagatgcataccct

SEQ ID NO: 235 - DNA, 30 bp, Artificial Sequence
  Plasmid backbones used to encode the protospacer sequences required for REXER
actcactggtcgctggcgcaaagccagcct

SEQ ID NO: 236 - DNA, 30 bp, Artificial Sequence
  Plasmid backbones used to encode the protospacer sequences required for REXER
atcatacgtaaggtcactatgaaacagcct

SEQ ID NO: 237 - DNA, 30 bp, Artificial Sequence
  Plasmid backbones used to encode the protospacer sequences required for REXER
gatatcatcgacacgcggtagcgtgaccct

SEQ ID NO: 238 - DNA, 30 bp, Artificial Sequence
  Plasmid backbones used to encode the protospacer sequences required for REXER
gctaaatccttacttccgcatattctccct

SEQ ID NO: 239 - DNA, 30 bp, Artificial Sequence
  Plasmid backbones used to encode the protospacer sequences required for REXER
cgcgtgtttatcgcgatagcaatcgaccct

SEQ ID NO: 240 - DNA, 30 bp, Artificial Sequence
  Plasmid backbones used to encode the protospacer sequences required for REXER
taatgtgtataacaaggaatagtgatgcct

SEQ ID NO: 241 - DNA, 30 bp, Artificial Sequence
  Plasmid backbones used to encode the protospacer sequences required for REXER
tccacatggagaaggtggggttaattgact

SEQ ID NO: 242 - DNA, 30 bp, Artificial Sequence
  Plasmid backbones used to encode the protospacer sequences required for REXER
gaagcgaagccgcatctgacagtcagaatg

SEQ ID NO: 243 - DNA, 30 bp, Artificial Sequence
  Plasmid backbones used to encode the protospacer sequences required for REXER
atattaattttatatttatttcgcagccct

SEQ ID NO: 244 - DNA, 30 bp, Artificial Sequence
  Plasmid backbones used to encode the protospacer sequences required for REXER
atttctcacattgatgacggtcgcatgcct

SEQ ID NO: 245 - DNA, 30 bp, Artificial Sequence
  Plasmid backbones used to encode the protospacer sequences required for REXER
cattttcaacattgttgcagctggcagcct

SEQ ID NO: 246 - DNA, 30 bp, Artificial Sequence
  Plasmid backbones used to encode the protospacer sequences required for REXER
ggatatctggggcatgacatggaagaccct

SEQ ID NO: 247 - DNA, 30 bp, Artificial Sequence
  Plasmid backbones used to encode the protospacer sequences required for REXER
taacagcggcacaacgggtttaacctgcct

SEQ ID NO: 248 - DNA, 30 bp, Artificial Sequence
  Plasmid backbones used to encode the protospacer sequences required for REXER
aaaacagttaagagcatactataaatccct

SEQ ID NO: 249 - DNA, 30 bp, Artificial Sequence
  Plasmid backbones used to encode the protospacer sequences required for REXER
tgattgtaatgcttagccattatcttccct

SEQ ID NO: 250 - DNA, 30 bp, Artificial Sequence
  Plasmid backbones used to encode the protospacer sequences required for REXER
aaccaggaaacagaacctctgacaatgcct

SEQ ID NO: 251 - DNA, 30 bp, Artificial Sequence
  Plasmid backbones used to encode the protospacer sequences required for REXER
tcgatggcatccattaacattccggtgcct

SEQ ID NO: 252 - DNA, 30 bp, Artificial Sequence
  Plasmid backbones used to encode the protospacer sequences required for REXER
ttttataattacaacgataaaaggctgcct

SEQ ID NO: 253 - DNA, 30 bp, Artificial Sequence
  Plasmid backbones used to encode the protospacer sequences required for REXER
aatatggcgctcttcagccgttaatcccct

SEQ ID NO: 254 - DNA, 30 bp, Artificial Sequence
  Plasmid backbones used to encode the protospacer sequences required for REXER
gtgggcaggttcttaggtgaaattatgcct

SEQ ID NO: 255 - DNA, 30 bp, Artificial Sequence
  Plasmid backbones used to encode the protospacer sequences required for REXER
tttatgtttggtcaactggcgtgccagcct

SEQ ID NO: 256 - DNA, 30 bp, Artificial Sequence
  Plasmid backbones used to encode the protospacer sequences required for REXER
cccgctcattttgtctattttttgcaccct

SEQ ID NO: 257 - DNA, 30 bp, Artificial Sequence
  Plasmid backbones used to encode the protospacer sequences required for REXER
gacgaaacctaacaggaagcacatcaccct

SEQ ID NO: 258 - DNA, 30 bp, Artificial Sequence
  Plasmid backbones used to encode the protospacer sequences required for REXER
ccttgttacctgatcagcgtaaacacccct

SEQ ID NO: 259 - DNA, 30 bp, Artificial Sequence
  Plasmid backbones used to encode the protospacer sequences required for REXER
gtgttgatcagctgacgtgcggaagaccct

SEQ ID NO: 260 - DNA, 30 bp, Artificial Sequence
  Plasmid backbones used to encode the protospacer sequences required for REXER
atttgttgaatttgcacgttcttgtagcct

SEQ ID NO: 261 - DNA, 30 bp, Artificial Sequence
  Plasmid backbones used to encode the protospacer sequences required for REXER
cacgctggtggtgtgtgccagacgctccct

SEQ ID NO: 262 - DNA, 30 bp, Artificial Sequence
  Plasmid backbones used to encode the protospacer sequences required for REXER
ttgttaccactcctgttattcctcaaccct

SEQ ID NO: 263 - DNA, 30 bp, Artificial Sequence
  Plasmid backbones used to encode the protospacer sequences required for REXER
ggagaaaatccgccccagcaggtcgtccct

SEQ ID NO: 264 - DNA, 30 bp, Artificial Sequence
  Plasmid backbones used to encode the protospacer sequences required for REXER
aatttttaatgctttatttgccatttccct

SEQ ID NO: 265 - DNA, 30 bp, Artificial Sequence
  Plasmid backbones used to encode the protospacer sequences required for REXER
aagctgacgcttaatgcggctcggctgcct

SEQ ID NO: 266 - DNA, 30 bp, Artificial Sequence
  Plasmid backbones used to encode the protospacer sequences required for REXER
acttataataactgcaactgttacatccct

SEQ ID NO: 267 - DNA, 30 bp, Artificial Sequence
  Plasmid backbones used to encode the protospacer sequences required for REXER
cctcccccttttgcctgcctccctttgcct

SEQ ID NO: 268 - DNA, 30 bp, Artificial Sequence
  Plasmid backbones used to encode the protospacer sequences required for REXER
ttcgccccccgtctggtctacatttggcct

SEQ ID NO: 269 - DNA, 30 bp, Artificial Sequence
  Plasmid backbones used to encode the protospacer sequences required for REXER
ctaaggccttttatcagctcgatatcgcct

SEQ ID NO: 270 - DNA, 30 bp, Artificial Sequence
  Plasmid backbones used to encode the protospacer sequences required for REXER
cgctccattgaggaagtcattcatatgcct

SEQ ID NO: 271 - DNA, 30 bp, Artificial Sequence
  Plasmid backbones used to encode the protospacer sequences required for REXER
accctttaacaacagagcttttcgctgcct

SEQ ID NO: 272 - DNA, 30 bp, Artificial Sequence
  Plasmid backbones used to encode the protospacer sequences required for REXER
cgggtaagccattacgctatccgacaccct

SEQ ID NO: 273 - DNA, 30 bp, Artificial Sequence
  Plasmid backbones used to encode the protospacer sequences required for REXER
cggtagagatgatatcgatcggcacaccct

SEQ ID NO: 274 - DNA, 30 bp, Artificial Sequence
  Plasmid backbones used to encode the protospacer sequences required for REXER
gaatgttcttaaaacattcacttttgccct

SEQ ID NO: 275 - DNA, 30 bp, Artificial Sequence
  Plasmid backbones used to encode the protospacer sequences required for REXER
tgtgccaggcgcaggttgaccatgctgcct

SEQ ID NO: 276 - DNA, 30 bp, Artificial Sequence
  Plasmid backbones used to encode the protospacer sequences required for REXER
catcttatccagcaaccaggtcgcatccct

SEQ ID NO: 277 - DNA, 30 bp, Artificial Sequence
  Plasmid backbones used to encode the protospacer sequences required for REXER
attgcgcaggcgcgcgtaaatttgctccct

SEQ ID NO: 278 - DNA, 30 bp, Artificial Sequence
  Plasmid backbones used to encode the protospacer sequences required for REXER
gtgggaataaggggtgaggctggcatgcct

SEQ ID NO: 279 - DNA, 30 bp, Artificial Sequence
  Plasmid backbones used to encode the protospacer sequences required for REXER
gaggaacctgggtaaatatttcctgctcct

SEQ ID NO: 280 - DNA, 30 bp, Artificial Sequence
  Plasmid backbones used to encode the protospacer sequences required for REXER
gcaccgattgccggatgcgacgtaacccct

SEQ ID NO: 281 - DNA, 2519 bp, Artificial Sequence
  pKW1_MB1amp_Spacers_REXER2
  misc_feature (2276)..(2305): n is a, c, g, or t
  misc_feature (2342)..(2371): n is a, c, g, or t
ttcttgaagacgaaagggcctcgtgatacgcctatttttataggttaatgtcatgataataatggtttcttagacgtcaggtggcacttttcggggaaatgtgcgcggaacccctatttgtttatttttctaaatacattcaaatatgtatccgctcatgagacaataaccctgataaatgcttcaataatattgaaaaaggaagagtatgagtattcaacatttccgtgtcgcccttattcccttttttgcggcattttgccttcctgtttttgctcacccagaaacgctggtgaaagtaaaagatgctgaagatcagttgggtgcacgagtgggttacatcgaactggatctcaacagcggtaagatccttgagagttttcgccccgaagaacgttttccaatgatgagcacttttaaagttctgctatgtggcgcggtattatcccgtgttgacgccgggcaagagcaactcggtcgccgcatacactattctcagaatgacttggttgagtactcaccagtcacagaaaagcatcttacggatggcatgacagtaagagaattatgcagtgctgccataaccatgagtgataacactgcggccaacttacttctgacaacgatcggaggaccgaaggagctaaccgcttttttgcacaacatgggggatcatgtaactcgccttgatcgttgggaaccggagctgaatgaagccataccaaacgacgagcgtgacaccacgatgcctgcagcaatggcaacaacgttgcgcaaactattaactggcgaactacttactctagcttcccggcaacaattaatagactggatggaggcggataaagttgcaggaccacttctgcgctcggcccttccggctggctggtttattgctgataaatctggagccggtgagcgtgggtctcgcggtatcattgcagcactggggccagatggtaagccctcccgtatcgtagttatctacacgacggggagtcaggcaactatggatgaacgaaatagacagatcgctgagataggtgcctcactgattaagcattggtaactgtcagaccaagtttactcatatatactttagattgatttaaaacttcatttttaatttaaaaggatctaggtgaagatcctttttgataatctcatgaccaaaatcccttaacgtgagttttcgttccactgagcgtcagaccccgtagaaaagatcaaaggatcttcttgagatcctttttttctgcgcgtaatctgctgcttgcaaacaaaaaaaccaccgctaccagcggtggtttgtttgccggatcaagagctaccaactctttttccgaaggtaactggcttcagcagagcgcagataccaaatactgtccttctagtgtagccgtagttaggccaccacttcaagaactctgtagcaccgcctacatacctcgctctgctaatcctgttaccagtggctgctgccagtggcgataagtcgtgtcttaccgggttggactcaagacgatagttaccggataaggcgcagcggtcgggctgaacggggggttcgtgcacacagcccagcttggagcgaacgacctacaccgaactgagatacctacagcgtgagctatgagaaagcgccacgcttcccgaagggagaaaggcggacaggtatccggtaagcggcagggtcggaacaggagagcgcacgagggagcttccagggggaaacgcctggtatctttatagtcctgtcgggtttcgccacctctgacttgagcgtcgatttttgtgatgctcgtcaggggggcggagcctatggaaaaacgccagcaacgcggcctttttacggttcctggccttttgctggccttttgctcacatgttctttcctgcgttatcccctgattctgtggataaccgtattaccgcctttgagtgagctgataccgctcgccgcagccgaacgcctaggtctagggcggcggatttgtcctactcaggagagcgttcaccgacaaacaacagataaaacgaaaggcccagtctttcgactgagcctttcgttttatttgatgcctctagcacgcgtaccatgggatcctatttcttaataactaaaaatatggtataatactcttaataaatgcagtaatacaggggcttttcaagactgaagtctagctgagacaaatagtgcgattacgaaattttttagacaaaaatagtctacgaggttttagagctatgctgttttgaatggtcccaaaacnnnnnnnnnnnnnnnnnnnnnnnnnnnnnngttttagagctatgctgttttgaatggtcccaaaacnnnnnnnnnnnnnnnnnnnnnnnnnnnnnngttttagagctatgctgttttgaatggtcccaaaacttcagcacactgagacttgttgagttgaattcggtcagtgcgtcctgctgatgtgctcagtatctctatcactgatagggatgtcaatctctatcactgatagggactcgag

SEQ ID NO: 282 - DNA, 2982 bp, Artificial Sequence
  pKW3_MB1amp_Spacers_REXER2
  misc_feature (2739)..(2768): n is a, c, g, or t
  misc_feature (2805)..(2834): n is a, c, g, or t
ttcttgaagacgaaagggcctcgtgatacgcctatttttataggttaatgtcatgataataatggtttcttagacgtcaggtggcacttttcggggaaatgtgcgcggaacccctatttgtttatttttctaaatacattcaaatatgtatccgctcatgagacaataaccctgataaatgcttcaataatattgaaaaaggaagagtatgagtattcaacatttccgtgtcgcccttattcccttttttgcggcattttgccttcctgtttttgctcacccagaaacgctggtgaaagtaaaagatgctgaagatcagttgggtgcacgagtgggttacatcgaactggatctcaacagcggtaagatccttgagagttttcgccccgaagaacgttttccaatgatgagcacttttaaagttctgctatgtggcgcggtattatcccgtgttgacgccgggcaagagcaactcggtcgccgcatacactattctcagaatgacttggttgagtactcaccagtcacagaaaagcatcttacggatggcatgacagtaagagaattatgcagtgctgccataaccatgagtgataacactgcggccaacttacttctgacaacgatcggaggaccgaaggagctaaccgcttttttgcacaacatgggggatcatgtaactcgccttgatcgttgggaaccggagctgaatgaagccataccaaacgacgagcgtgacaccacgatgcctgcagcaatggcaacaacgttgcgcaaactattaactggcgaactacttactctagcttcccggcaacaattaatagactggatggaggcggataaagttgcaggaccacttctgcgctcggcccttccggctggctggtttattgctgataaatctggagccggtgagcgtgggtctcgcggtatcattgcagcactggggccagatggtaagccctcccgtatcgtagttatctacacgacggggagtcaggcaactatggatgaacgaaatagacagatcgctgagataggtgcctcactgattaagcattggtaactgtcagaccaagtttactcatatatactttagattgatttaaaacttcatttttaatttaaaaggatctaggtgaagatcctttttgataatctcatgaccaaaatcccttaacgtgagttttcgttccactgagcgtcagaccccgtagaaaagatcaaaggatcttcttgagatcctttttttctgcgcgtaatctgctgcttgcaaacaaaaaaaccaccgctaccagcggtggtttgtttgccggatcaagagctaccaactctttttccgaaggtaactggcttcagcagagcgcagataccaaatactgtccttctagtgtagccgtagttaggccaccacttcaagaactctgtagcaccgcctacatacctcgctctgctaatcctgttaccagtggctgctgccagtggcgataagtcgtgtcttaccgggttggactcaagacgatagttaccggataaggcgcagcggtcgggctgaacggggggttcgtgcacacagcccagcttggagcgaacgacctacaccgaactgagatacctacagcgtgagctatgagaaagcgccacgcttcccgaagggagaaaggcggacaggtatccggtaagcggcagggtcggaacaggagagcgcacgagggagcttccagggggaaacgcctggtatctttatagtcctgtcgggtttcgccacctctgacttgagcgtcgatttttgtgatgctcgtcaggggggcggagcctatggaaaaacgccagcaacgcggcctttttacggttcctggccttttgctggccttttgctcacatgttctttcctgcgttatcccctgattctgtggataaccgtattaccgcctttgagtgagctgataccgctcgccgcagccgaacgcctaggtctagggcggcggatttgtcctactcaggagagcgttcaccgacaaacaacagataaaacgaaaggcccagtctttcgactgagcctttcgttttatttgatgcctctagcacgcgtaccatggaaaaagtttaaattaaatccataatgatttgatgatttcaataatagttttaatgacctccgaaattagtttaatatgctttaatttttctttttcaaaatatctcttcaaaaaatattacccaatacttaataataaatagattataacacaaaattcttttaaaaagtagtttattttgttatcattctatagtattaagtattgttttatggctgataaatttctttgaatttctccttgattatttgttataaaagttataaaataatcttgttggaaccattcaaaacagcatagcaagttaaaataaggctagtccgttatcaacttgaaaaagtggcaccgagtcggtgctttttttgatacttctattctactctgactgcaaaccaaaaaaacaagcgctttcaaaacgcttgttttatcatttttagggaaattaatctcttaatccttttaggatcctatttcttaataactaaaaatatggtataatactcttaataaatgcagtaatacaggggcttttcaagactgaagtctagctgagacaaatagtgcgattacgaaattttttagacaaaaatagtctacgaggttttagagctatgctgttttgaatggtcccaaaacnnnnnnnnnnnnnnnnnnnnnnnnnnnnnngttttagagctatgctgttttgaatggtcccaaaacnnnnnnnnnnnnnnnnnnnnnnnnnnnnnngttttagagctatgctgttttgaatggtcccaaaacttcagcacactgagacttgttgagttgaattcggtcagtgcgtcctgctgatgtgctcagtatctctatcactgatagggatgtcaatctctatcactgatagggactcgag

SEQ ID NO: 283 - DNA, 1671 bp, Artificial Sequence
  GentamycinR-OriT cassette
aattcctgccgacatggaagccatcacaaacggcatgatgaacctgaatcgccagcggcatcagcaccttgtcgccttgcgtataatatttgcccatggacgcacaccgtggaaacggatgaaggcacgaacccagttgacataagcctgttcggttcgtaaactgtaatgcaagtagcgtatgcgctcacgcaactggtccagaaccttgaccgaacgcagcggtggtaacggcgcagtggcggttttcatggcttgttatgactgtttttttgtacagtctatgcctcgggcatccaagcagcaagcgcgttacgccgtgggtcgatgtttgatgttatggagcagcaacgatgttacgcagcagcaacgatgttacgcagcagggcagtcgccctaaaacaaagttaggtggctcaagtatgggcatcattcgcacatgtaggctcggccctgaccaagtcaaatccatgcgggctgctcttgatcttttcggtcgtgagttcggagacgtagccacctactcccaacatcagccggactccgattacctcgggaacttgctccgtagtaagacattcatcgcgcttgctgccttcgaccaagaagcggttgttggcgctctcgcggcttacgttctgcccaggtttgagcagccgcgtagtgagatctatatctatgatctcgcagtctccggcgagcaccggaggcagggcattgccaccgcgctcatcaatctcctcaagcatgaggccaacgcgcttggtgcttatgtgatctacgtgcaagcagattacggtgacgatcccgcagtggctctctatacaaagttgggcatacgggaagaagtgatgcactttgatatcgacccaagtaccgccacctaaggcgctcggtcttgccttgctcgtcggtgatgtacttcaccagctccgcgaagtcgctcttcttgatggagcgcatggggacgtgcttggcaatcacgcgcaccccccggccgttttagcggctaaaaaagtcatggctctgccctcgggcggaccacgcccatcatgaccttgccaagctcgtcctgcttctcttcgatcttcgccagcagggcgaggatcgtggcatcaccgaaccgcgccgtgcgcgggtcgtcggtgagccagagtttcagcaggccgcccaggcggcccaggtcgccattgatgcgggccagctcgcggacgtgctcatagtccacgacgcccgtgattttgtagccctggccgacggccagcaggtaggccgacaggctcatgccggccgccgccgccttttcctcaatcgctcttcgttcgtctggaaggcagtacaccttgataggtgggctgcccttcctggttggcttggtttcatcagccatccgcttgccctcatctgttacgccggcggtagccggccagcctcgcagagcaggattcccgttgagcaccgccaggtgcgaataagggacagtgaagaaggaacacccgctcgcgggtgggcctacttcacctatcctgcccggctgacgccgttggatacaccaaggaaagtctacacgaaccctttggcaaaatcctgtatatcgtgcgaaaaaggatggatataccgaaaaaatcgctataatgaccccgaagcagggttatgcagcggaaaagcgct

SEQ ID NO: 284 - DNA, 77 bp, Artificial Sequence
  Primers for conjugation
aaggccatcagtggatggaagagcaattagtcagtatttgcaaacgctaaaattcctgccgacatggaagccatcac

SEQ ID NO: 285 - DNA, 72 bp, Artificial Sequence
  Primers for conjugation
cttgcttaagcaattggcagccagagacataaacacggggtaataagaatagcgcttttccgctgcataacc

SEQ ID NO: 286 - DNA, 77 bp, Artificial Sequence
  Primers for conjugation
tggatccgtaccgttaaaacgtaacgctattcagacaatgcttttttaggaattcctgccgacatggaagccatcac

SEQ ID NO: 287 - DNA, 72 bp, Artificial Sequence
  Primers for conjugation
ttttaaatttcgcttttcctgaattcagacaacacgatcccctgccaactagcgcttttccgctgcataacc

SEQ ID NO: 288 - DNA, 76 bp, Artificial Sequence
  Primers for conjugation
cctcctgcgaagagaataagattttcataaggcggatagcgatacagatgggcctggtgatgatggcgggatcgtt

SEQ ID NO: 289 - DNA, 72 bp, Artificial Sequence
  Primers for conjugation
ttttcacccgtaaagcaggtgtcgagtatacgttctgatgtgaaagcggaagcgcttttccgctgcataacc

SEQ ID NO: 290 - DNA, 77 bp, Artificial Sequence
  Primers for conjugation
ttatgccatgtacccagggaaaatcatcttcagtatagtaattatgtaaaaattcctgccgacatggaagccatcac

SEQ ID NO: 291 - DNA, 72 bp, Artificial Sequence
  Primers for conjugation
ttcacagctccttgctgaaagataatttcgttaccgtacgtattgttctcagcgcttttccgctgcataacc

SEQ ID NO: 292 - DNA, 77 bp, Artificial Sequence
  Primers for conjugation
tttctggttatcatcagctgtaatcttaatttcactgccggagattgcataattcctgccgacatggaagccatcac

SEQ ID NO: 293 - DNA, 72 bp, Artificial Sequence
  Primers for conjugation
agtgaccttacgtatgatgacatcatcaggtcattgtggcgggataacgcagcgcttttccgctgcataacc

SEQ ID NO: 294 - DNA, 77 bp, Artificial Sequence
  Primers for conjugation
tacaatcatttggttaaatttgctggttatagtgcagttaaccactataaaattcctgccgacatggaagccatcac

SEQ ID NO: 295 - DNA, 72 bp, Artificial Sequence
  Primers for conjugation
tagtatgctcttaactgttttaagatgctgatttaagaaaacataagaggagcgcttttccgctgcataacc

SEQ ID NO: 296 - DNA, 77 bp, Artificial Sequence
  Primers for conjugation
ctgcgcgacgaagaagaataatcttccctctacgacgtgttcctgaacgcaattcctgccgacatggaagccatcac

SEQ ID NO: 297 - DNA, 72 bp, Artificial Sequence
  Primers for conjugation
gtttacgctgatcaggtaacaaggcgcgccaaaaagcaaaacgcccgcatagcgcttttccgctgcataacc

SEQ ID NO: 298 - DNA, 77 bp, Artificial Sequence
  Primers for conjugation
gcataaggaatgacaaaaatttttcattcttgaatataaaaaacagatgcaattcctgccgacatggaagccatcac

SEQ ID NO: 299 - DNA, 72 bp, Artificial Sequence
  Primers for conjugation
agttgcagttattataagttcaagtaaaacagccttgtattaataccagaagcgcttttccgctgcataacc

SEQ ID NO: 300 - DNA, 77 bp, Artificial Sequence
  Primers for conjugation
cagacccgcgagcattaattcttgcctccagggcgcggtagccgctgcgcaattcctgccgacatggaagccatcac

SEQ ID NO: 301 - DNA, 72 bp, Artificial Sequence
  Primers for conjugation
agtgaatgttttaagaacattccgtaagcggctaataaggaagggaaattagcgcttttccgctgcataacc

SEQ ID NO: 302 - DNA, 96 bp, Artificial Sequence
  Primers for conjugation
ggcgtgctcagccgtagctaagccgcgaacaaaaatacgcgccaggtgaatttcctaaggcctggtgatgatggcgggatcgttgtatatttcttg

SEQ ID NO: 303 - DNA, 87 bp, Artificial Sequence
  Primers for conjugation
catgccagcctcaccccttattcccactttgccccacaatttcccactgatcagaagaactcgtcaagaaggcgatagaaggcgatg

SEQ ID NO: 304 - DNA, 83 bp, Artificial Sequence
  Primers for conjugation
gcttccctgttgcgccgaaaggtcaatttatccttaaacatcagcagtaaaagcttgagcacgtgttgacaattaatcatcgg

SEQ ID NO: 305 - DNA, 79 bp, Artificial Sequence
  Primers for conjugation
accttaaccggagaatgcccgccgcaaggacgggcattgcaggggccagattattcctttgccctcggacgagtgctgg

SEQ ID NO: 306 - DNA, 80 bp, Artificial Sequence
  Primers for conjugation
gacaccttctcccagtcggctgctatgactaactatgaccaggtttaccatttattcctttgccctcggacgagtgctgg

SEQ ID NO: 307 - DNA, 83 bp, Artificial Sequence
  Primers for conjugation
gtttatgatgcaaatgttggcgttagccgcaaaagagtaaggaattggtgaagcttgagcacgtgttgacaattaatcatcgg

SEQ ID NO: 308 - DNA, 83 bp, Artificial Sequence
  Primers for conjugation
tcagcgtaaatgatttgcgcacggtattaactattttacaccaggcataaaagcttgagcacgtgttgacaattaatcatcgg

SEQ ID NO: 309 - DNA, 79 bp, Artificial Sequence
  Primers for conjugation
atatattttttagttcggcggggagggtgttcccgccgaaatattattgcttattcctttgccctcggacgagtgctgg

SEQ ID NO: 310 - DNA, 79 bp, Artificial Sequence
  Primers for conjugation
gaatccaccagcgttccatcaagatcaaacagaaaacctttgcaccgcacttattcctttgccctcggacgagtgctgg

SEQ ID NO: 311 - DNA, 83 bp, Artificial Sequence
  Primers for conjugation
tttgagcgccaacgaaattaatcaaattatcaatgcctgaggaggcccgcaagcttgagcacgtgttgacaattaatcatcgg

SEQ ID NO: 312 - DNA, 79 bp, Artificial Sequence
  Primers for conjugation
ataaggtgttttacctgggttgttacaaaaggattgcattgcgtaaacgcttattcctttgccctcggacgagtgctgg

SEQ ID NO: 313 - DNA, 83 bp, Artificial Sequence
  Primers for conjugation
ctccaatttatcttcgccgtaatacttccccattttgttgtaaataaaaaaagcttgagcacgtgttgacaattaatcatcgg

SEQ ID NO: 314 - DNA, 79 bp, Artificial Sequence
  Primers for conjugation
tttgccagatcggttaagaaatccagcacctgctgcgggttttctgccatttattcctttgccctcggacgagtgctgg

SEQ ID NO: 315 - DNA, 83 bp, Artificial Sequence
  Primers for conjugation
cgcaactgctgggctttgaaaactacgcctttaaatcccttgccactaaaaagcttgagcacgtgttgacaattaatcatcgg

SEQ ID NO: 316 - DNA, 79 bp, Artificial Sequence
  Primers for conjugation
agcggccatgcccatgcccagcccagcgtgttaccgaggccagacggatcttattcctttgccctcggacgagtgctgg

SEQ ID NO: 317 - DNA, 83 bp, Artificial Sequence
  Primers for conjugation
ccggtagctggacgccggaaggcaaccagatggcacgccgtgataacgccaagcttgagcacgtgttgacaattaatcatcgg

SEQ ID NO: 318 - DNA, 79 bp, Artificial Sequence
  Primers for conjugation
tcttatcaggcctacaagtctgtgccgaaccgtaggccgtatccggcatgttattcctttgccctcggacgagtgctgg

SEQ ID NO: 319 - DNA, 83 bp, Artificial Sequence
  Primers for conjugation
taaaggtgcgcggggtgagccggttgatatttccggcgctctatttgtgaaagcttgagcacgtgttgacaattaatcatcgg

SEQ ID NO: 320 - DNA, 64504 bp, Artificial Sequence
  Construct for conjugation
ttatggctctgcacccggctccatcaccaacaggtcgcgcacgcgcttcactcggttgcggatcgacactgccagcccaacaaagccggttgccgccgccgccaggatcgcgccgatgatgccggccacaccggccatcgcccaccaggtcgccgccttccggttccattcctgctggtactgcttcgcaatgctggacctcggctcaccataggctgaccgctcgatggcgtatgccgcttctccccttggcgtaaaacccagcgccgcaggcggcattgccatgctgcccgccgctttcccgaccacgacgcgcgcaccaggcttgcggtccagaccttcggccacggcgagctgcgcaaggacataatcagccgccgacttggctccacgcgcctcgatcagctcttgcactcgcgcgaaatccttggcctccacggccgccatgaatcgcgcacgcggcgaaggctccgcagggccggcgtcgtgatcgccgccgagaatgcccttcaccaagttcgacgacacgaaaatcatgctgacggctatcaccatcatgcagacggatcgcacgaacccgctgaattcacccccgaacacgagcacggcacccgcgaccactatgccaagaatgcccaaggtaaaaattgccggccccgccatgaagtccgtgaatgccccgacggccgaagtgaagggcaggccgccacccaggccgccgccctcactgcccggcacctggtcgctgaatgtcgatgccagcacctgcggcacgtcaatgcttccgggcgtcgcgctcgggctgatcgcccatcccgttactgccccgatcccggcaatggcaaggactgccagcgccgcgatgaggaagcgggtgccccgcttcttcatcttcgcgcctcgggcctcgaggccgcctacctgggcgaaaacatcggtgtttgtggcattcatacggactcctgttgggccagctcgcgcacgggctggcgggtcagcttggcttgaagatcgccacgcattgcggcgatctgcttctcggcatccttgcgcttctgcacgccttcctgctggatgcgaataacgtcctcgacggtcttgatgagcgtcgtctgaacctgcttgagcgtgtccacgtcgatcaccaggcgttggttctccttcgccgtctcgacggacgtgcgatgcagcagggccgcattgcgcttcatcaggtcgttggtggtgtcgtcgatggccgtggccagttcgacggcgttcttctgctcgttgaggctcaaggccagcatgaattgccgcttccacgccggcacggtgatttcgcggatggtgtggaatttatcgaccagcatctggttgttggcctggatcatgcggatggtcggcaggctctgcatggccgaatgttgcaaggcgatcaggtcgccgatgcgcttgtccaggttggcaaccatcgcatcgaggtcggccagctcctgcacgcggcccgggtcgttcccgacattgccgcgcagaccctcggcctgctcgcgcagctcggcaaggcggaccttgccggccgcgatgtggacgccaagaaggcggtgttcctcgcgcacggctgcgaacatttcgtcgagcgaggcattgcgctgcgcgatgccttgctgggtggtctgcacttcgctgaccaggtgttcgatctgctcgcgggtcgtgtcgaagcgcgccatgaagcccgtcgaacggacgcggaagcggtcgatcagcgggccaatcaggggcaggcgggaacggttgtcggacaaagggccgacgttcagggaacgggccttggcgacaacctgggtcagtttctcgcctgcttcgtccaggtcgctgttgcgcacctggtccagcaggctatcggcgtagcgggacgtgtgctcggccacgtcgcggccgaactcggcaacggtctgcggactgccgacctcgatccgctgcgcgaccgcatggacttccggcacgtcgctttcctgcaagcccagctcgcgcagggttgccggggtcatgtcgaaggcgacgataggggccttggcgtcgtgcgtcgttttcagtgcgttcatagggttctcccgccgtgttattggttgatgccttccaggctctgcgaaaggctccgcatgagcgcctggtgagctttggccgcctcggcgaccattgccggattcatgttcttggtggtgatgagcgcgagggtgtgctgacgccagacgggcaccaggacggatgccgtttcagagaagcggtccagcatgtccacggcctgcgcccgcgtgagcttcatctgagtgacgctcatttcatgggacgccatgagggttgccaggttggcgagcttgcgcgcgaagcgttcgcgcggcttgtcgaactcgatcacgccggccttggccgcgccggcctcggggttctcgtccaggaactcgcgcccggcttgaatgtaggctctgagccggtctacctcggcctcatgcgtattgagcatgtcatccaaggcgcgcaacgtgtcccgcacgcgctgcgctacgccctcggcttcgtccagcaactggtcgagcgtcttgcgggcgacctgatacctcacctggcgttcaacctcacggccaagcatcttctcgaaccaggtaggcttttccgcgatcttgcgggggtccgcgtcggccagcttcgccacgatctggctgattttgtcggccagcgcggcaactgcgccgtgctccatcagattcgacagctcgttgagggaatccgccccgtcgatgccggccccgtactcgccaatcgtcgccggcgacgcgaagagggcgggcaaaacctcccccttcaatcgcgccatgttcacgctttgttcttccattcgatacaccctcgcggtgggttaattgcttttcgatggaagaagtttagctaaactttctatccctcgtcaacacctttagccgctaaaatttggggacaggtcatttacagaaagccagctcactcctggcgttgccccttgagcgccgctaggcgcgcagcatccttcgcgctgagaaagaacgtcatcagcggcccgaccgtcttgcttgaaccgtcggcaaagcaaacatccatcgaacagccttgcgtgtgggggtccacgccttcgaccagtttccaagggtccatgccccagccctcggcctccggattgaaccagtacgccgatgcgtcgccgtttaggtcgctgtcggcgtagtccttgaccagcacggccacccgcccggtcgtcgggcacacgtagcccggctgcttaggttcctgtcttggcattgctcaaagctccttgaaggggccgctctacagccccttgggcttgtagagcgacacgaaataggtgagtgcggtcagtaccgcgaaatgcaccaggaacgtccagccggcatgaacgccaagggtgttccagtggtacagcatccgcaggaactgaaagaaaacgtcgatagagatgatccacttcgccaccggccacaccaggacagtaacgacccatacaaagcggaccagggcctggacacccttggcaaaagtgaaccggggcggggccttgctcggggcctcaacgcgcggggcaggggcctcggcctccacttccacgcctgggaacttgataatcttcgacattgcttgaccctccacggcgatgcgtgttcaattcgtccagcgctcgcgcgcctagaccgtgatgtgacagcatcgaggtcaagcgccccggagaaatccggggcgtcatccctatgccccgtccaactcgggaaccggcttttccctggtgctcaacctggccggctcgacccacttggtgacttgctgccactcgttaccactgcgaacggctacccgaatctgcacacgtttagccgcgatcttcgtcactatgccagcaacacaaacggaatacccgtacccgccgcgcggggtgtgctgccagttcaccctatctcctacttgcatcatcatcccctggcgtcagtgaccggcccggaatttcgccaagtcgatttcgttgaaggtccagcgctgtttcgcccgttcctccaacctcgacgactcccgcatgacctcgatgcgcaggcgctcgacctggtgcatcagctcatcagcgcgccgctgcttctcggcaatagcattccgctgcgcgaccagctcctggtctacgttcggcagctcgtcgatccacggcatgaacttatcggtcatcggattggcctccggtaattgacctgggaatctacccggcctcaaaacaagaatagggcataatgccctaacttgtcaagcaattttagctaaacaattgaggggattcagcgaggcgtcatgcttgaaaacacctttcccctggcgtgcaatcagcttgtcccggcggcagcgcactgccgcagcgcggccagcaaggtgccttgctcgatccgctgtcgttcctccggcgtaatgcaatcgccgcagataccgcccagctcttcgcgcagggcgtccgccccgatcaggctgcggctaagggtcgaaatggacttaccgcagcggcggcaattggtggtgacaatctcgatcttgcggttgggcatggccctatctccttgagagaggcccgaccgtagccgggcctcgttccgttaccagcctgcgcgagccttcgcgcgttcgacttcctgggtggaccagtggccctttgcttcaccctccagggtgcaaccttgcaggtacgccttgtgccgcagctcttcggcctggcgggtaagctctgccgcctgctccatcagcgccgcgatctggtcacgacgggccagaaaatccgtggcggccgcgccgggcagctcatcgagccaagacatgatcttgcttttcatcggggttgatcctccggttgctgacctgggcgaagtgcccggccttggattgctatattagggcattatgccctagatagtcaaggaaatttagctaaacaatttgcggcgggcgcacgaaaaaacccggcttgcgggccgggctgctggcagcatatcgcaacgatcagggttggcggttttagccgctaaagtcctctcccttggcgtaaagtcctgcgggcgtcagccctggcctttccagatcgccccaatccccgctagatcgcaaaggatcgcccaggcggcataggggatcggcgaatcctcgccaacccaacgccgcaccgtgcggtcgcccttggcacccaagcccaagatgcgcgcagcctgtccgccggtgaggccggccaagtgcaagacttcccggatttctgcgccggtcggctgcacccagcgttccgccgggcgcaggcactcaagccggatattcacgtcgctcatgctgcttttctcctaatcgttatcaaatggcggcccgcaattggtcgtagccgtagcacgactcgatgcaacgcgggtcatattcacaaacctttctaccgttgcgattgatgcgatagcgcggcggcttgtcgtcgtgcgcccacacctgtcgcgtttcgggactgatcttcgtaatgatgacgtgcttcccgatttccttggcaaaaaccgggtgatgcacgctcacaatctcgcaccgcaggccaggaaagaacgtcgccggccacgccggcgcgtcctcgtccttggccggctccggctccggcttggccggtgtaaccggctccctgcgctgcccggccggctcctgagctttcgcacgcgcggccgcgagcttcgccttggcgctggccgcccatttgcgggcgatgaatgcctggtgcgccggcagcacggcatcaacccaggcgaagcccggcggcagttcgtccggcttccgccagtcctcgaccacggcccgcacgcggcgcggcggtggcgtgatacccgcgagccacgccggcagtggctcgtcggcaaggcggtcctggtcgcgggcgtccagataccggcgatgcgagcgcaacagggcgcgcaaaaccccgtccgctacctggtccaccgtcatgccgccgcgcgcatggtcgtaatgggaccgatagcccgtttcggaaataaaaggggtctgacgctcagtggaacgaaaactcacgttaagggattttggtcatgagattatcaaaaaggatcttcacctagatccttttaaattaaaaatgaagttttaaatcaatctaaagtatatatgagtaaacttggtctgacagaattcgcggccgcttctagaggaaatcataaaaaatttatttgctttgtgagcggataacaattataatagattcaattgtgagcggataacaattactagagaaagaggagaaatactagatgaaatttggaaactttttgcttacataccaacctccccaattttctcaaacagaggtaatgaaacgtttggttaaattaggtcgcatctctgaggagtgtggttttgataccgtatggttactggagcatcatttcacggagtttggtttgcttggtaacccttatgtcgctgctgcatatttacttggcgcgactaaaaaattgaatgtaggaactgccgctattgttcttcccacagcccatccagtacgccaacttgaagatgtgaatttattggatcaaatgtcaaaaggacgatttcggtttggtatttgccgagggctttacaacaaggactttcgcgtattcggcacagatatgaataacagtcgcgccttagcggaatgctggtacgggctgataaagaatggcatgacagagggatatatggaagctgataatgaacatatcaagttccataaggtaaaagtaaaccccgcggcgtatagcagaggtggcgcaccggtttatgtggtggctgaatcagcttcgacgactgagtgggctgctcaatttggcctaccgatgatattaagttggattataaatactaacgaaaagaaagcacaacttgagctttataatgaagtggctcaagaatatgggcacgatattcataatatcgaccattgcttatcatatataacatctgtagatcatgactcaattaaagcgaaagagatttgccggaaatttctggggcattggtatgattcttatgtgaatgctacgactatttttgatgattcagaccaaacaagaggttatgatttcaataaagggcagtggcgtgactttgtattaaaaggacataaagatactaatcgccgtattgattacagttacgaaatcaatcccgtgggaacgccgcaggaatgtattgacataattcaaaaagacattgatgctacaggaatatcaaatatttgttgtggatttgaagctaatggaacagtagacgaaattattgcttccatgaagctcttccagtctgatgtcatgccatttcttaaagaaaaacaacgttcgctattatattaataatactagagaaagaggagaaatactagatgaaatttggattgttcttccttaacttcatcaattcaacaactgttcaagaacaaagtatagttcgcatgcaggaaataacggagtatgttgataagttgaattttgaacagattttagtgtatgaaaatcatttttcagataatggtgttgtcggcgctcctctgactgtttctggttttctgctcggtttaacagagaaaattaaaattggttcattaaatcacatcattacaactcatcatcctgtccgcatagcggaggaagcttgcttattggatcagttaagtgaagggagatttattttagggtttagtgattgcgaaaaaaaagatgaaatgcatttttttaatcgcccggttgaatatcaacagcaactatttgaagagtgttatgaaatcattaacgatgctttaacaacaggctattgtaatccagataacgatttttatagcttccctaaaatatctgtaaatccccatgcttatacgccaggcggacctcggaaatatgtaacagcaaccagtcatcatattgttgagtgggcggccaaaaaaggtattcctctcatctttaagtgggatgattctaatgatgttagatatgaatatgctgaaagatataaagccgttgcggataaatatgacgttgacctatcagagatagaccatcagttaatgatattagttaactataacgaagatagtaataaagctaaacaagagacgcgtgcatttattagtgattatgttcttgaaatgcaccctaatgaaaatttcgaaaataaacttgaagaaataattgcagaaaacgctgtcggaaattatacggagtgtataactgcggctaagttggcaattgaaaagtgtggtgcgaaaagtgtattgctgtcctttgaaccaatgaatgatttgatgagccaaaaaaatgtaatcaatattgttgatgataatattaagaagtaccacatggaatatacctaataatactagagaaagaggagaaatactagatgactaaaaaaatttcattcattattaacggccaggttgaaatctttcccgaaagtgatgatttagtgcaatccattaattttggtgataatagtgtttacctgccaatattgaatgactctcatgtaaaaaacattattgattgtaatggaaataacgaattacggttgcataacattgtcaattttctctatacggtagggcaaagatggaaaaatgaagaatactcaagacgcaggacatacattcgtgacttaaaaaaatatatgggatattcagaagaaatggctaagctagaggccaattggatatctatgattttatgttctaaaggcggcctttatgatgttgtagaaaatgaacttggttctcgccatatcatggatgaatggctacctcaggatgaaagttatgttcgggcttttccgaaaggtaaatctgtacatctgttggcaggtaatgttccattatctgggatcatgtctatattacgcgcaattttaactaagaatcagtgtattataaaaacatcgtcaaccgatccttttaccgctaatgcattagcgttaagttttattgatgtagaccctaatcatccgataacgcgctctttatctgttatatattggccccaccaaggtgatacatcactcgcaaaagaaattatgcgacatgcggatgttattgtcgcttggggagggccagatgcgattaattgggcggtagagcatgcgccatcttatgctgatgtgattaaatttggttctaaaaagagtctttgcattatcgataatcctgttgatttgacgtccgcagcgacaggtgcggctcatgatgtttgtttttacgatcagcgagcttgtttttctgcccaaaacatatattacatgggaaatcattatgaggaatttaagttagcgttgatagaaaaacttaatctatatgcgcatatattaccgaatgccaaaaaagattttgatgaaaaggcggcctattctttagttcaaaaagaaagcttgtttgctggattaaaagtagaggtggatattcatcaacgttggatgattattgagtcaaatgcaggtgtggaatttaatcaaccacttggcagatgtgtgtaccttcatcacgtcgataatattgagcaaatattgccttatgttcaaaaaaataagacgcaaaccatatctatttttccttgggagtcatcatttaaatatcgagatgcgttagcattaaaaggtgcggaaaggattgtagaagcaggaatgaataacatatttcgagttggtggatctcatgacggaatgagaccgttgcaacgattagtgacatatatttctcatgaaaggccatctaactatacggctaaggatgttgcggttgaaatagaacagactcgattcctggaagaagataagttccttgtatttgtcccataataatactagagaaagaggagaaatactagatggaaaatgaatcaaaatataaaaccatcgaccacgttatttgtgttgaaggaaataaaaaaattcatgtttgggaaacgctgccagaagaaaacagcccaaagagaaagaatgccattattattgcgtctggttttgcccgcaggatggatcattttgctggtctggcggaatatttatcgcggaatggatttcatgtgatccgctatgattcgcttcaccacgttggattgagttcagggacaattgatgaatttacaatgtctataggaaagcagagcttgttagcagtggttgattggttaactacacgaaaaataaataacttcggtatgttggcttcaagcttatctgcgcggatagcttatgcaagcctatctgaaatcaatgcttcgtttttaatcaccgcagtcggtgttgttaacttaagatattctcttgaaagagctttagggtttgattatctcagtctacccattaatgaattgccggataatctggattttgaaggccataaattgggtgctgaagtctttgcgagagattgtcttgattttggttgggaagatttagcttctacaattaataacatgatgtatcttgatataccgtttattgcttttactgcaaataacgataattgggtcaagcaagatgaagttatcacattgttatcaaatattcgtagtaatcgatgcaagatatattctttgttaggaagttcgcatgacttgagtgaaaatttagtggtcctgcgcaatttttatcaatcggttacgaaagccgctatcgcgatggataatgatcatctggatattgatgttgatattactgaaccgtcatttgaacatttaactattgcgacagtcaatgaacgccgaatgagaattgagattgaaaatcaagcaatttctctgtcttaataatactagagaaagaggagaaatactagatgacttcatatgttgataaacaagaaattacagcaagctcagaaattgatgatttgattttttcgagcgatccattagtgtggtcttacgacgagcaggaaaaaatcagaaagaaacttgtgcttgatgcatttcgtaatcattataaacattgtcgagaatatcgtcactactgtcaggcacacaaagtagatgacaatattacggaaattgatgacatacctgtattcccaacatcggtttttaagtttactcgcttattaacttctcaggaaaacgagattgaaagttggtttaccagtagcggcacgaatggtttaaaaagtcaggtggcgcgtgacagattaagtattgagagactcttaggctctgtgagttatggcatgaaatatgttggtagttggtttgatcatcaaatagaattagtcaatttgggaccagatagatttaatgctcataatatttggtttaaatatgttatgagtttggtggaattgttatatcctacgacatttaccgtaacagaagaacgaatagattttgttaaaacattgaatagtcttgaacgaataaaaaatcaagggaaagatctttgtcttattggttcgccatactttatttatttactctgccattatatgaaagataaaaaaatctcattttctggagataaaagcctttatatcataaccggaggcggctggaaaagttacgaaaaagaatctctgaaacgtgatgatttcaatcatcttttatttgatactttcaatctcagtgatattagtcagatccgagatatatttaatcaagttgaactcaacacttgtttctttgaggatgaaatgcagcgtaaacatgttccgccgtgggtatatgcgcgagcgcttgatcctgaaacgttgaaacctgtacctgatggaacgccggggttgatgagttatatggatgcgtcagcaaccagttatccagcatttattgttaccgatgatgtcgggataattagcagagaatatggtaagtatcccggcgtgctcgttgaaattttacgtcgcgtcaatacgaggacgcagaaagggtgtgctttaagcttaaccgaagcgtttgatagttaataatactagtagcggccgctgcaggcctcaggttccgcgcacatttccccgaaaagtgccacctgacgtctaagaaaccattattatcatgacattaacctataaaaataagcgtatcacgaggccctttcgtcttcaagaattttataaaccgtggagcgggcaatactgagctgatgagcaatttccgttgcaccagtgcccttctgatgaagcgtcagcacgacgttcctgtccacggtacgcctgcggccaaatttgattcctttcagctttgcttcctgtcggccctcattcgtgcgctctaggatcctccggcgttcagcttgtgccacagccgacaggatggtgaccaccatttgccccatatcaccgtcggtactgatcccgtcgtcaataaaccgaaccgcgacaccctgagcatcaaactcttttatcagttggatcatgtcggcggtgtcgcggccaagacggtcgagcttcttcaccagaatgacatcaccttcctccaccttcatcctcagcaaatccagcccttcccgatctgttgaactgccggatgccttgtcggtaaagatgcggttagcttttacccctgcatctttgagcgctctgatctgaatatcgagggactgctggctggttgagacccgcgcataaccaaaaattcgcataaaatgtaccttaaatcgaatatcagacacgatgtgtctattatgccaaaatgacgatttaatggacactcaaacgaagccgttttactatgtctgataatttataacatttcggacggttgcaaaaatgttactaaatgcccgtcaggcagggaggccgatatgcccgttgactttctgaccactgagcagactgaaagctatggcagattcaccggtgaaccggatgagcttcagctggcacgatattttcatcttgatgaagcagacaaggaatttatcggaaaaagcagaggtgatcacaaccgtctgggcattgccctgcaaattggatgtgtccgttttctgggcaccttcctcaccgatatgaatcatattccttccggcgtccggcattttaccgccagacagctcgggattcgtgatatcaccgttcttgcagaatacggtcagagggaaaatacccgccgtgagcatgcagcgctgatacgtcagcactatcagtatcgtgaatttgcctggccctggacatttcgccttacccgtcttttatatacccggagctggataagcaacgaacgtcctggcctgcttttcgatctggcgacagggtggcttatgcaacatcgtattattctccccggagccactacgctgacccggttgatttcagaggtaagggaaaaggcgacgttgcgcctgtggaacaaactggcactgataccgtcagccgaacaacgttcacagctggagatgctgctggggccaactgattgcagccgcctgtctttactggaatcactgaaaaaaggccctgtgaccatcagtggtccggcgtttaatgaagcaattgaacgctggaaaactctgaacgattttggcttgcatgctgacaacctgagtacactcccggctgtgcgcctgaaaaatctcgcacgttatgctggtatgacttcggtgttcaatattgccaggatgtcaccgcagaaaaggatggcggttctggttgcctttgtccttgcatgggaaacgctggcgttggatgatgcactggacgttctggacgccatgctggccgttatcatccgtgacgccagaaagattgggcagaaaaaacggctccgctcgctgaaggatctggataaatctgcattggcgctcgccagcgcatgttcgtacctgctgaaagaagaaacaccggacgaatcgattcgtgctgaggtgttcagctacatccccaggcaaaagctggctgaaatcatcacgcttgtccgtgaaattgcccggccctcagacgataattttcatgaagaaatggtggagcagtacgggcgcgttcgtcgtttcctgccccatctgctgaataccgttaaattttcatccgcacctgccggggttaccactctgaatgcctgtgactacctcagccgggagttcagctcacggcggcagttttttgacgacgcaccaacggaaattatcagtcggtcatggaaacggctggtgattaacaaggaaaaacatatcacccgcaggggatacacgctctgctttctcagtaaactgcaggatagtctgaggcggagggatgtctacgttaccggcagtaaccggtggggagatccccgagcaagattactacagggtgctgactggcaggcaaaccggattaaggtttatcgttctctgggacacccgacagacccgcaggaagcaataaaatctctgggtcatcagcttgatagtcgttacagacaggttgctgcacgtcttggcgaaaatgaggctgtcgaactcgatgtttctggcccgaagccccggttgacaatttctcccctcgccagtcttgatgagccggacagtctgaaacgactgagcaaaatgatcagtgatctgctccctccggtggatttaacggagttgctgctcgaaattaacgcccataccggatttgctgatgagtttttccatgctagtgaagccagtgccagagttgatgatctgcccgtcagcatcagcgccgtgctgatggctgaagcctgcaatatcggtctggaaccactgatcagatcaaatgttcctgcactgacccgacaccggctgaactggacaaaagcgaactatctgcgggctgaaactatcaccagcgctaatgccagactggttgattttcaggcaacgctgccactggcacagatatggggtggcggagaagtggcatctgcagatggaatgcgctttgttacgccagtcagaacaatcaatgccggaccgaaccgcaaatactttggtaataacagagggatcacctggtacaactttgtgtccgatcagtattccggctttcatggcatcgttataccggggacgctgagggactctatctttgtgctggaaggccttctggaacaggagaccgggctgaatccaaccgaaattatgaccgatacagcaggtaccagcgaacttgtctttggccttttctggctgctgggataccagttttctccacgcctggctgatgccggtgcttcggttttctggcgaatgggccatgatgccaactatggcgtgctgaatgatattgccagagggcaatcagatccccgaaaaatagtccttcagtgggacgaaatgatccggaccgctggctccctgaaactgggcaaagtacaggcttcagtgctggtccgttcattgctgaaaagtgaacgtccttccggactgactcaggcaatcattgaagtggggcgcatcaacaaaacgctgtatctgcttaattatattgatgatgaagattaccgccggcgcattctgacccagcttaatcggggagaaagccgccatgccgttgccagagccatctgtcacggtcaaaaaggtgagataagaaaacgatataccgacggtcaggaagatcaactgggcgcactggggctggtcactaacgccgtcgtgttatggaacactatgtatatgcaggcagccctggatcatctccgggcgcaaggtgaaacactgaatgatgaagatatcgcacgcctctccccgctttgccacggacatatcaatatgctcggccattattccttcacgctggcagaactggtgaccaaaggacatctgagaccattaaaagaggcgtcagaggtagaaaacgttgcttaacgtgagttttcgttccactgagcgtcagacccctaaaagggccgtccaggtccacggcgtggaactggaaatgcaccgtggttaggccgccgtagccgctttcgacctccacccatacgcgcatcccgtccacggaagccaggaagtcgccttcctggccccacatcgggacgacgcccggcgtcgcgcggcaatggcgctctatgaccctctcggccgcatcctggtcgccggcgcaaccgaagaacgtgcccccgttgagcttccacaccgccgccgcgtaacgctcgccggccacgtcggccaccaaatcggcacgattgagcactgcgtcatgcaccgccgctaccgcgtccgccgcaacggccagcaggccggcgcgatcctcgggcagcgtcgccgccagcgctgcaatgcgcgcgtccttgtcctcggtctgcggcttgcttttgcgcgccttcgtccgccggcgagccgccggggtggtcgcctcgggcggcgtcgggttggctaccaggtaggccgcgatgcaatccggtttccggtagtcatcgcagaacttcaagccgtccaggacgcagcaggtcggcaacgggtactgcatccagtattcgggttccgggaacggatgcagcaactcgccgcagtggtggcatcgctctgtctcgcggtcctgcaccgaaccgctgaacaagcggccggcaacgatggcatcgttgcggcgcttgatgttgtcgtcttgcatgctcgcctccaacggcccccagcctttcggccgggggcctgccccttagtcgatggcccggtagatcgccgccgcctcggcgtgctcgctcgcaaacgccgccaggtggtggtagcggtcgatcagggcgtccgcgtcggccgtgccggccagctccgcgcagagctggttcagggcgaagagcgtggcgacgatgccggcggcgtcggccgacagctcgcccgcgaagccgttgccatcgacctcgatgcgcaagcggccgtcatgctccggggccatgtagaagccaccgttcgagagggtgtagaagtgccagaaaccgccgtggtaggcagcgcaaaggcggcccatccagccgaataccagggcctcgccgcgcagcatgcgcagcatcgaggggccgaagtacgtcggcagaaaccgcaggcgatccgcctcggcgacgcgggtggcaacgataggggaggggatttgaacatcagtcatcggactttctccggtagttgacctgggcggaatgcccggcctcaagaccaatattagggcattatgccctagcctgtcaagcaaatttagctaaactatgccgccggccgtacccgattctgcggttacagctcggtcctggtcccgaccgggctttgccaggcgggcggatggaacgccaagggggagcgcggccgttgaatggtgatcgccatcacgtttcattgacacttgaggggcgtttagagcgagccaggaaagccgaccccctccttggagtaaaaacccttgcggcgttgcagccggcacggatcttccgatcgggcgcggtggtggccgcgtctgtgacctaaaaaggggggagtccagaggggcgcagcccctttgggcatagcgcagcgtaatcggagacgtaattgagcatttccaggcgcttgcgcctggtcaacgaaagagtcagcgccgtaggcgctgccatttttggggtgaggccgttcgcggccgaggggcgcagcccctggggggatgggaggcccgcgttagcgggccgggagggttcgagaagggggggcaccccccttcggcgtgcgcggtcacgcgccagggcgcagccctggttaaaaacaaggtttataaatattggtttaaaagcaggttaaaagacaggttagcggtggccgaaaaacgggcggaaacccttgcaaatgctggattttctgcctgtggacagcccctcaaatgtcaataggtgcgcccctcatctgtcatcactctgcccctcaagtgtcaaggatcgcgcccctcatctgtcagtagtcgcgcccctcaagtgtcaataccgcagggcacttatccccaggcttgtccacatcatctgtgggaaactcgcgtaaaatcaggcgttttcgccgatttgcgaggctggccagctccacgtcgccggccgaaatcgagcctgcccctcatctgtcaacgccgcgccgggtgagtcggcccctcaagtgtcaacgtccgcccctcatctgtcagtgagggccaagttttccgcgaggtatccacaacgccggcggccgcggtgtctcgcacacggcttcgacggcgtttctggcgcgtttgcagggccatagacggccgccagcccagcggcgagggcaaccagcccggtgagcgtcggaaaggcgctggaagccccgtagcgacgcggagaggggcgagacaagccaagggcgcaggctcgatgcgcagcacgacatagccggttctcgcaaggacgagaatttccctgcggtgcccctcaagtgtcaatgaaagtttccaacgcgagccattcgcgagagccttgagtccacgctagatctatctcatctgcgcaaggcagaacgtgaagacggccgccctggacctcgcccgcgagcgccaggcgcacgaggccggcgcgcggacccgcgccacggcccacgagcggacgccgcagcaggagcgccagaaggccgccagagaggccgagcgcggccgtgaggcttggacgctagggcagggcatgaaaaagcccgtagcgggctgctacgggcgtctgacgcggtggaaagggggaggggatgttgtctacatggctctgctgtagtgagtgggttgcgctccggcagcggtcctgatcagccaatcgactggcgagcggcatcgcattcttcgcatcccgcctctggcggatgcaggaagatcaacggatctcggcccagttgacccagggctgtcgccacaatgtcgcgggagcggatcaaccgagcaaaggcatgaccgactggaccttccttctgaaggctcttctccttgagccacctgtccgccaaggcaaagcgctcacagcagtggtcattctcgagataatcgacgcgtaccaacttgccatcctgaagaatggtgcagtgtctcggcaccccatagggaacctttgccatcaactcggcaagatgcagcgtcgtgttggcatcgtgtcccacgccgaggagaagtacctgcccatcgagttcatggacacgggcgaccgggcttgcaggcgagtgaggtggcaggggcaatggatcagagatgatctgctctgcctgtggccccgctgccgcaaaggcaaatggatgggcgctgcgctttacatttggcaggcgccagaatgtgtcagagacaactccaaggtccggtgtaacgggcgacgtggcaggatcgaacggctcgtcgtccagacctgaccacgagggcatgacgagcgtccctcccggacccagcgcagcacgcagggcctcgatcagtccaagtggcccatcttcgaggggccggacgctacggaaggagctgtggaccagcagcacaccgccgggggtaaccccaaggttgagaagctgaccgatgagctcggcttttcgccattcgtattgcacgacattgcactccaccgctgatgacatcagtcgatcatagcacgatcaacggcactgttgcaaatagtcggtggtgataaacttatcatccccttttgctgatggagctgcacatgaacccattcaaaggccggcattttcagcgtgacatcattctgtgggccgtacgctggtactgcaaataccggcatcagttaccgtgagctgcaggtcgtcggatcctttagtgagggttaattgcggccgcgaattcttgaagacgaaagggcctcgtgatacgtcgtggaaacgataggcctatgccatgcgggtcaaggcgacttccggcaagctatacgcgccctaggagtgcggttggaacgttggcccagccagatactcccgatcacgagcaggacgccgatgatttgaagcgcactcagcgtctgatccaagaacaaccatcctagcaacacggcggtccccgggctgagaaagcccagtaaggaaacaactgtaggttcgagtcgcgagatcccccggaaccaaaggaagtaggttaaacccgctccgatcaggccgagccacgccaggccgagaacattggttccttgtaggcatcgggattggcggatcaaacactaaagctactggaacgagcagaagtcctccggccgccagttgccaggcggtaaaggtgagcagaggcacgggaggttgccacttgcgggtcagcacggttccgaacgccatggaaaccgcccccgccaggcccgctgcgacgccgacaggatctagcgctgcgtttggtgtcaacaccaacagcgccacgcccgcagttccgcaaatagcccccaggaccgccatcaatcgtatcgggctacctagcagagcggcagagatgaacacgaccatcagcggctgcacagcgcctaccgtcgccgcgacccgcccggcaggcggtagaccgaaataaacaacaagctccagaatagcgaaatattaagtgcgccgaggatgaagatgcgcatccaccagattcccgttggaatctgtcggacgatcatcacgagcaataaacccgccggcaacgcccgcagcagcataccggcgacccctcggcctcgctgttcgggctccacgaaaacgccggacagatgcgccttgtgagcgtccttggggccgtcctcctgtttgaagaccgacagcccaatgatctcgccgtcgatgtaggcgccgaatgccacggcatctcgcaaccgttcagcgaacgcctccatgggctttttctcctcgtgctcgtaaacggacccgaacatctctggagctttcttcagggccgacaatcggatctcgcggaaatcctgcacgtcggccgctccaagccgtcgaatctgagccttaatcacaattgtcaattttaatcctctgtttatcggcagttcgtagagcgcgccgtgcgcccgagcgatactgagcgaagcaagtgcgtcgagcagtgcccgcttgttcctgaaatgccagtaaagcgctggctgctgaacccccagccggaactgaccccacaaggccctagcgtttgcaatgcaccaggtcatcattgacccaggcgtgttccaccaggccgctgcctcgcaactcttcgcaggcttcgccgacctgctcgcgccacttcttcacgcgggtggaatccgatccgcacatgaggcggaaggtttccagcttgagcgggtacggctcccggtgcgagctgaaatagtcgaacatccgtcgggccgtcggcgacagcttgcggtacttctcccatatgaatttcgtgtagtggtcgccagcaaacagcacgacgatttcctcgtcgatcaggacctggcaacgggacgttttcttgccacggtccaggacgcggaagcggtgcagcagcgacaccgattccaggtgcccaacgcggtcggacgtgaagcccatcgccgtcgcctgtaggcgcgacaggcattcctcggccttcgtgtaataccggccattgatcgaccagcccaggtcctggcaaagctcgtagaacgtgaaggtgatcggctcgccgataggggtgcgcttcgcgtactccaacacctgctgccacaccagttcgtcatcgtcggcccgcagctcgacgccggtgtaggtgatcttcacgtccttgttgacgtggaaaatgaccttgttttgcagcgcctcgcgcgggattttcttgttgcgcgtggtgaacagggcagagcgggccgtgtcgtttggcatcgctcgcatcgtgtccggccacggcgcaatatcgaacaaggaaagctgcatttccttgatctgctgcttcgtgtgtttcagcaacgcggcctgcttggcctcgctgacctgttttgccaggtcctcgccggcggtttttcgcttcttggtcgtcatagttcctcgcgtgtcgatggtcatcgacttcgccaaacctgccgcctcctgttcgagacgacgcgaacgctccacggcggccgatggcgcgggcagggcagggggagccagttgcacgctgtcgcgctcgatcttggccgtagcttgctggaccatcgagccgacggactggaaggtttcgcggggcgcacgcatgacggtgcggcttgcgatggtttcggcatcctcggcggaaaaccccgcgtcgatcagttcttgcctgtatgccttccggtcaaacgtccgattcattcaccctccttgcgggattgccccgactcacgccggggcaatgtgcccttattcctgatttgacccgcctggtgccttggtgtccagataatccaccttatcggcaatgaagtcggtcccgtagaccgtctggccgtccttctcgtacttggtattccgaatcttgccctgcacgaataccagcgaccccttgcccaaatacttgccgtgggcctcggcctgagagccaaaacacttgatgcggaagaagtcggtgcgctcctgcttgtcgccggcatcgttgcgccactcttcattaaccgctatatcgaaaattgcttgcggcttgttagaattgccatgacgtacctcggtgtcacgggtaagattaccgataaactggaactgattatggctcatatcgaaagtctccttgagaaaggagactctagtttagctaaacattggttccgctgtcaagaactttagcggctaaaattttgcgggccgcgaccaaaggtgcgaggggcggcttccgctgtgtacaaccagatatttttcaccaacatccttcgtctgctcgatgagcggggcatgacgaaacatgagctgtcggagagggcaggggtttcaatttcgtttttatcagacttaaccaacggtaaggccaacccctcgttgaaggtgatggaggccattgccgacgccctggaaactcccctacctcttctcctggagtccaccgaccttgaccgcgaggcactcgcggagattgcgggtcatcctttcaagagcagcgtgccgcccggatacgaacgcatcagtgtggttttgccgtcacataaggcgtttatcgtaaagaaatggggcgacgacacccgaaaaaagctgcgtggaaggctctgacgccaagggttagggcttgcacttccttctttagccgctaaaacggccccttctctgcgggccgtcggctcgcgcatcatatcgacatcctcaacggaagccgtgccgcgaatggcatcgggcgggtgcgctttgacagttgttttctatcagaacccctacgtcgtgcggttcgattagctgtttgtcttgcaggctaaacactttcggtatatcgtttgcctgtgcgataatgttgctaatgatttgttgcgtaggggttactgaaaagtgagcgggaaagaagagtttcagaccatcaaggagcgggccaagcgcaagctggaacgcgacatgggtgcggacctgttggccgcgctcaacgacccgaaaaccgttgaagtcatgctcaacgcggacggcaaggtgtggcacgaacgccttggcgagccgatgcggtacatctgcgacatgcggcccagccagtcgcaggcgattatagaaacggtggccggattccacggcaaagaggtcacgcggcattcgcccatcctggaaggcgagttccccttggatggcagccgctttgccggccaattgccgccggtcgtggccgcgccaacctttgcgatccgcaagcgcgcggtcgccatcttcacgctggaacagtacgtcgaggcgggcatcatgacccgcgagcaatacgaggtcattaaaagcgccgtcgcggcgcatcgaaacatcctcgtcattggcggtactggctcgggcaagaccacgctcgtcaacgcgatcatcaatgaaatggtcgccttcaacccgtctgagcgcgtcgtcatcatcgaggacaccggcgaaatccagtgcgccgcagagaacgccgtccaataccacaccagcatcgacgtctcgatgacgctgctgctcaagacaacgctgcgtatgcgccccgaccgcatcctggtcggtgaggtacgtggccccgaagcccttgatctgttgatggcctggaacaccgggcatgaaggaggtgccgccaccctgcacgcaaacaaccccaaagcgggcctgagccggctcgccatgcttatcagcatgcacccggattcaccgaaacccattgagccgctgattggcgaggcggttcatgtggtcgtccatatcgccaggacccctagcggccgtcgagtgcaagaaattctcgaagttcttggttacgagaacggccagtacatcaccaaaaccctgtaaggagtatttccaatgacaacggctgttccgttccgtctgaccatgaatcgcggcattttgttctaccttgccgtgttcttcgttctcgctctcgcgttatccgcgcatccggcgatggcctcggaaggcaccggcggcagcttgccatatgagagctggctgacgaacctgcgcaactccgtaaccggcccggtggccttcgcgctgtccatcatcggcatcgtcgtcgccggcggcgtgctgatcttcggcggcgaactcaacgccttcttccgaaccctgatcttcctggttctggtgatggcgctgctggtcggcgcgcagaacgtgatgagcaccttcttcggtcgtggtgccgaaatcgcggccctcggcaacggggcgctgcaccaggtgcaagtcgcggcggcggatgccgtgcgtgcggtagcggctggacggctcgcctaatcatggctctgcgcacgatccccatccgtcgcgcaggcaaccgagaaaacctgttcatgggtggtgatcgtgaactggtgatgttctcgggcctgatggcgtttgcgctgattttcagcgcccaagagctgcgggccaccgtggtcggtctgatcctgtggttcggggcgctctatgcgttccgaatcatggcgaaggccgatccgaagatgcggttcgtgtacctgcgtcaccgccggtacaagccgtattacccggcccgctcgaccccgttccgcgagaacaccaatagccaagggaagcaataccgatgatccaagcaattgcgattgcaatcgcgggcctcggcgcgcttctgttgttcatcctctttgcccgcatccgcgcggtcgatgccgaactgaaactgaaaaagcatcgttccaaggacgccggcctggccgatctgctcaactacgccgctgtcgtcgatgacggcgtaatcgtgggcaagaacggcagctttatggctgcctggctgtacaagggcgatgacaacgcaagcagcaccgaccagcagcgcgaagtagtgtccgcccgcatcaaccaggccctcgcgggcctgggaagtgggtggatgatccatgtggacgccgtgcggcgtcctgctccgaactacgcggagcggggcctgtcggcgttccctgaccgtctgacggcagcgattgaagaagagcgccggcggcatttcgagagcctgggaacgatgtacgagggctatttcgtcctcaccttgacctggttcccgccgctgctcgcccagcgcaagttcgtcgagctgatgtttgacgacgacgcgaccgcaccggatcgcaaggcgcgcacgcggggcctcatcgaccaattcaagcgtgacgtgcgcagcatcgagtcgcgcctgtcgtcggccgtgtcgctcactcgcttgaaggggcacaagatcgtcaacgaggacggcacgaccgtcacgcatgacgacttcctgcgctggctgcaattctgcgtgacgggcctgcaccatccggtgcagctccccagcaacccgatgtacctggacgccctggtcggcggacaggaaatgtggggcggggtagtgcccaaggtcggccgcaagttcgtccaggtggtcgctctcgaaggcttccccttggagtcctatcccggcatcctgacggcgctcggcgagctgccctgcgagtatcggtggtcgagccggttcatcttcatggaccagcacgaagccgtgaagcacctcgacaagttccgcaagaagtggcggcagaagattcgcggcttcttcgaccaggtgttcaacacgaacaccggcccggtcgatcaggacgcgctttcgatggtggccgatgctgaggcggccattgccgaagtcaacagcggcatcgtggccgtgggctactacaccagcgtcgtcgtgctgatggatgaggaccgcacgcgcctggaagctgcggcccgcgatgttgaaaaggccgtcaaccggttgggctttgccgcgcgcatcgagtccatcaacaccctggacgccttccttggtagtttgccgggccacggcgtggaaaacgtccgccggccgctcatcaacacgatgaacctggccgacctgctgccgaccagcaccatctggaccggcaacgcgaacgcgccatgcccgatgtacccgccgctgtcgccggcgctcatgcactgcgtcacgcaaggatcaacgccgttccggctgaacctgcacgtgcgcgacctcggccacacctttatgttcgggccgaccggcgcaggtaaatcgacgcacctggcgatcctcgccgcgcagctccgtcgctatgccggcatgtcgatcttcgcctttgacaagggcatgtcgatgtacccgctggccgccggcatccgtgcggccacgaagggcaccagcggcctgcacttcaccgtggcggccgacgacgaacgcctggcgttctgcccgttgcagttcctgagcaccaagggcgaccgtgcttgggcgatggagtggatcgacaccatcctggcgttgaacggcgtcgaaacgaccccggcccagcgcaacgaaatcggcaacgcgatcatgagcatgcacgccagcggcgcgcgcacgctctccgagttcagcgtgacgattcaggatgaggcgatccgcgaggcgatccgccagtacaccgtcgatggcgcaatgggccatctgctcgacgccgaagaggacggcttggcgctgtccgactttacagtgttcgagatcgaagagctgatgaacctcggcgagaaattcgccctgcctgtgttgctctacctgttccgccgtatcgagcgcgccctgacgggccagccggccgtcatcatcctggacgaagcctggttgatgctcggccacccggcattccgcgcgaagatcagggaatggctcaaggtgctgcgtaaggccaactgccttgtgctgatggcaacgcagagcctgtccgacgccgccaacagcggcatcctggacgtgatcgtggaatcgaccgcgaccaagattttcctgccgaatatttacgccagggatgaggacacggcggccctgtaccgccgcatgggcctgaacgctcgccagatcgagattctggcccaggccgttcccaagcgtcagtactactacgtgtcggaaaacggccgccgtctctacgacctggcacttggcccgctcgcgctcgcgttcgtcggcgcatccgacaaggaatccgtcgccatcatcaagaacctggaagccaagttcggcgaccagtgggtggatgaatggctgcgtggccggggcctcgcccttgatgaatacctggaggcagcatgagttttgcagacacgatcaagggcttgatcttcaagaagaagcccgcaacggccgcagcagcggcgacgccggccgcgaccggcccgcaaaccgacaacccgtacctgacggcgcggcgcacctggaacgaccacgttggttccgttgtgtcgcaaaagcagacctggcaggttgtcggcatcctttcgctgatgatcgtcctcgcggcggtcggcggcatcatccacatcggcagccagtcgaagttcgtgccctatgtctacgaggtagacaagctcgggcagacggccgccgtggggccgatgaccagggcgtcgaaagccgatccgcgtgtcattcacgcctcggtggctgagttcgtcggcgatgctcgcctggtgacgccggacgtagctttgcagcgcaaggccgtctaccgcctctatgccaagctcgggccgaatgacccggccaccgccaagatgaacgaatggctcaacggcaccgccgacgccagcccgttcgctcgcgcggccgtcgaaacggtcagcaccgaaatcacttccgtaatcccgcagacgcccgacacctggcaggtcgattgggtcgagacgacgcgcgacaggcaaggcgtggtgaaaggccagcccgtgcgcatgcgggccttggtgacggtctacgtcgtcgagccgacggcggacaccaaggaagaacaactgcgaaacaacccggccgggatctacgtccgggacttctcctggtcgagacttctgtgaggcactgaattatgaaaaaggaactgtttgctttggtcctggccgcgtccgttagcgtgcctgcatttgccgccgatcccggcgcggacctgactgacctctatttttccggcaagaacccggagctgaccgcgcaagagcgggcggccatcgccatcgccaagaagtgggaggcgggtaccgccggcatgcggccggtggccggccccggtggttcggtgcgcttcctgttcggcgcgcagcagccgagcatcgtatgcgccgtgctgcaagtgtgcgacgtggccctgcaacccggcgagcaagtcaactcgatcaacctgggcgacaccgcccgttggacggtcgagccggccattaccggcagcggcgcgaacgaaacccagcacctcatcatcaagccgatggatgtgggcctggaaaccagcctggtcgtgaccacggaccgccgcagctaccacatgcgcctgcgctcgcatcgcacgcagtacatgccgcaggtgtcgttcacctacccggaagatgcccttgcgaagtgggacgccatcaagaaccgcgaacagcgggatcgcgtcgagaaaaccattccgcagaccggcgagtacctgggcaacctgagcttcaactactccgtcagcgggtccacgtcgtggaagccggtgcgcgtctacaacgacggcaagaaaaccatcatccagatgccgcactcgatggaacagaccgaagcgccgacgctcctggtcgttcgcagggagggcggcctgttctccgacgatgaaacggtgatggtcaactaccgggtccagggcgaccgctacatcgtcgatacgattttcgacaaggccatcctcatcgcgggcgtgggcagcagccaggaccgcgtgaccatttcaagggggaactaaaccatgcgtaagattctgaccgtcatcgcactcgcggccacgttggccggctgcgcgacctccaagtacggcagcttcgtccaggacgcgccggccgcctacaaccagaccattgcgaccgacgcggtgaagcagctcgtcaagctctacccgccggcgcaaaccaagctggaattgcagcaggctacgcccgatccgttcggcattgccctggtcactgaccttcgcgcccagggctatgctgtcatggagtacaagcccgacggcaacgcggccgcagctccggctgctgcgtcctcggccgctgcgaagccggcaacgccgcaagcccagggcggctatccgctgcgctacgtgctggaccaattcagcgacagcaacctgtatcgcctgaccgtcatggtcggctctcaatcgctcacgcgcgcctacctcgcccaaaacaacacgatggtcccggccggcgcatgggttcggaaggagtaagccaatgagcgaagatcaaatggcaccggacgcatcgccagatgcggtcaagccgaaaagcggggttcgccgcgtcaacaacatgccgatgtacctcatcggcggtgtgctcggcatcttcctgctggtgatggccctggttgctgcggatcgcgctgcgcagcagaaccagccgggagctgcgaaggctgagaaggccggcagcaccagcatgtttgccgacgaaattgccggcaaacagcaggacggcatcatcaaggccaagccgctggagattccgccggaacaaaccgcccagcaaccgacgacggagctgacgccagccccggcgcagggaacgactatcacggtcgcacggcccgagaacctggaccagcccccgacgccgccgcagggtgcgcgcaacgaggacctggaccgcatccgcatggcgaagttgcagatgctggaagaggcgatcaaggccaagacgacggtgcgcatcgacgcgccgcgcagccagggcagcgccggcggcggtgctccgcagggccgcgaggaaacccttgcgcgcatccaggagctgcgtcggcaggctgagaacgcccgcgccaccgatccgaccgccgcctatcaggccgcgcttgcgcaggctcgcacgatgggcggcgcggcagggggtggcggtatgggcggctcgggtgcgccgaccctcgtgcagacctcgaaccgcagtggtggcggcgctggctatgggtcgttcgacaaccgcagcgagggcgaccgttggcggctcgactcccagccggaagcacctgcaacgccctatgtgctgcgcgctggcttcgtcgttccggctacgcttatctcgggcatcaactccgatctgccaggccaaatcatggcccaggtatcgcagtcggtgtacgacacggcgaccggcaagcacatgctcatcccccaaggctcgcgcctggtgggcagctactcgaacgatgtggcctacgggcagaagcgcgttctggtggcatggcagcgcatcatcttccccgacggcaaggcaatggacattggggccatgccgggcggcgatagcgctgggtatgcaggcttcaacgacaaggtcaacaaccactacttccgcaccttcgcatcggcattcctcatgtcgggcgtcgttgcgggcatcagcttgagtcaggaccgtggcaacagcaacagcggttacggacgacaagacgcgggttccgcgatgagtgaagcgttgggtcaacagctcggccaagtaacggcgcagatgatcgccaaaaacttgaatatcgcgccgacgctggaaatccgtccgggctatcgcttcaacgtcattgtcacgaaagacatgacgttttctaagccctaccaggcgtttgactattaactccaaggagtaacttatgaagaagctcgctaagaatgttttagccgctaaagtagctctggtgctggccctctcggtcggcaccttggcggtcacgcctgcgcaagcgggcattccggtcatcgacggcaccaacctgtcacaaaccactgtcaccgcgattcagcaggttgcgcaggtccagaagcaaatcgaggaataccggacgcagttgcagcagtacgaaaacatgctgcaaaacacggtggccccggccgcctacgtgtgggaccaggcgcagtccaccatcaacggcctgatgagcgccgttgataccctgaactactacaagaaccaggcgggcagcatcgacgcttacctgggcaagttcaaggacgtgtcctactacaaggggtcgccgtgcttctccctgtcgggctgctcggaaagcgagcgcaaggcgatggaagagaaccgccgcctggcgtccgaatcgcagaaaaaggccaacgatgcgctgttccgtggcctcgatcagcagcagagcaacctcaagtccgacgccgccacgctggagcaattgaagggcaaggcgacgacggcgcagggccagttggaagccctcggctacgccaaccagttcgccagccagcaggccaaccagctcatgcaaatccgtggccttctgcttgcgcagcagaacgccatcgccacgcagatgcaggcccagcaggaccggcaggcccagcaggacgctgcgggcgcgaagctgcgcgagggttcgtaccgcgcaagcccgtctaagacctggtgaggggaggcgcgatgaagaaatccaacttcatcgcagttgccgcgctggccgccgtcatggcggccagcctggcaggctgcgacaacaagcccgacaccgacaagctgacctgcgccgatctgccgaaggtcacggatgccgctcaacgcgcggagctgttgaagaagtgcccgcgcggagaaccgggaggcttcaagcccagcgaaaagaaagagtggtgatgacgtatgaaaatccagactagagctgccgcgctcgcggtcctgatgctggccttgatgccggtagcggcatacgcccaaatcgacaattcgggcatcctcgacaacgtattgcagcgctaccagaacgccgcgagcggctgggccactgtcgtccagaacgccgcaacctggctgttctggaccttgaccgtgattagcatggtctggaccttcggcatgatggcactgcgcaaggccgacattggcgagttcttcgccgagttcgtgcggttcaccatcttcaccggcttcttctggtggctgctgaccaacggcccgaatttcgcgtcgtccatctatgcgtccctgcggcagattgcaggccaggcaacggggttggggcaggggctttcgccgtccggcatcgtcgatgttggcttcgagattttcttcaaggtgatggacgaaacctcgtactggtcgccggtcgatagcttcgtcggtgcctcgttggcggccgccatcctctgcatcctggccctggtcggcgtgaatatgcttctgctcctggcgtccggatggattcttgcctacggcggtgtgttcttcctgggcttcggcggctcgcgctggacctcggacatggcgatcaactactacaagaccgtcctcggggtcgccgcgcagctcttcgcaatggtgctgctcgtaggcatcggcaagaccttcctcgatgactactacagccgcatgagcgaaggcatcaacttcaaggaacttggagtgatgctgatcgtcggcctgatcctgctcgttctggtcaacaaggtgccgcagctcatcgccggcatcatcaccggcgcgagcgtcggcggtgctggtatcggccagttcggcgctggcacgctcgtcggtgcggccgcgacggccggcgcggcaatcgcaactggcggcgcatctatcgcggccggcgctgcggcggcggccggtggcgcgcaggccatcatggcggccgcgtcgaaggccagcgataacgtctctgccggcactgacattctgtcgagcatgatgggcggcggcggtggcggcggcggtggtagcgccggcaccagcggcggcgacggcggcggctcgggtggcggcggtggctcgggcggcggtgaaaccccgatggcctcggccgccggcgacaacagcagcggcgcacgcggcggcagttcgggcggcggctcgggtggtggccgttcgtctggcggtatcggtgccacggcggccaagggcggccggatcgcggccgataccgtcgccaacctggcgaaaggtgccggctcgattgccaaggccaaggccggcgaaatgcgcgcatcggcccaggaacgcatcggcgataccgtaggcggcaagatcgcgcaggcaattcgcggcgcgggtgcggcggcgcagaccgctgcaaccgtcgccgatagcaacagccaggcgcaggaacaacctgcaccggcacccgcaccgtcgttcgacgacaacagcctttccgcaagcaacaacagggaagcggccgccgacgcggattccgaagtggcgagcttcgtcaacaagcccgcccaatcctgaaacgactcttaggagctacgaccatgcaactgaaaaaagcgttctcgtcggccgccctggtggtggccttgggcctcggcgcaactggctcggccagcgcgcaagacgtgctgacgggcgatacccgcctggcctgcgaggccattctgtgcctgtccacgggcagccggcccagcgagtgcagcccgtcgctctcgcggtacttcggcatccacaagcgcaagctgtcggacacgctcaaggcgcggctgaacttcctcaacctctgcccggtatcgaaccagacgccggaaatgcagacgctcgtttcctcgatttcgcgcggggccgggcgctgcgatgcgtcctcgctgaactccgtgctgcgtgagtggcggagctgggacgaccagttctacatcggcaaccgcctgccggactactgcgcggcctacaccggccatgcctataccgacttcaacacgaccgcgccgcgctacgtcggcacgccggaagagggcggctattggatcgaggcggccgactacgaccgcgcgctcaaggagtacgaggcgaagctgaaagagcggcagcagcagtacggtcgctatggcagcgacgcctaccgtcggttcgagcggtaaggggaggggatagcgatgccgtttgccaagctgctggcacggaacgctctgccggtggtcgccctggtggcggccactggcttcggtgcggcggatgcgaccgccgcacggctcttccccgatctgtcggaacagatggaagagcgcgttgtgtgctcggtgtctgcggccgcgaagtacgagattccggccaacattcttctcgccattcgggaaaaggagggcggcaagccgggccagtgggtcaagaacaccaatggcacctatgacgtgggcgagctgcaattcaacaccgcctacctgggcgacctggcgaagtatgggatcacggcccaggacgttgctgcggcaggctgctatccctatgacctggcggcctggcggttgcgcgggcacattcgcaacgacaggggcgatctgtggacacgcgccgctaactatcactcgcgcacgccgtcgaagaacgcgatctatcgcgccgatctgatggtgaaggccgacaagtgggcgaagtggctggatgcgcgtttcgtcaccgtcaactatggccccagctcgccggcgcagccggcagggaaggggaccacacttgcggccgctgatacgtcggcagcagcgccggccgaagcgcagccgatgaagcaaggccggatcacccgcaccagcctccgcagctcgggttacgtaccccggcagctcatcatcaacaacacgccataaggaggaacggccgtttagcggctaaagcctatgggcattcgcaacctgacgcagcgatacatgaacggggccagggcctacgcggcctgggcggcatcgcaggcgaaagcgccgtttgatcttctggtactgggcatcgggcctgtcatcgtctttggcctggtcgcgcatacgctgctcgcgttcctgcccacatgggccatgtacgccgccggcgctctgctggtcctcgcggccctgcctttggcgctgcacgtcctccgggaatacgcgctgcgctatgggcgcaaatagcgccctgcagggcgttcttactccaagggggagggcatgaatacacgcgccatgaacgacgccagcggccgggcctcgctgcctgccatggtgatcgccgacggcaccattgaagccttgaagtggctcgccttgcttgccatgaccggggatcacgtcaacaagtacctgttcaacggtacgctgccatatctgttcgaggcggggcgcttggccctgcctcttttcgttttcgtcctggcgtacaacctcgcccgcccgggcgcgctcgagcgcggtttgtacgggcgagcgatgaaacgcctgttggccttcggcctggtcgcctcggtcccgttcattgcgttgggtggagtggtgggcggatggtggccgctgaacgtcatgttcacgctgttggccgcaaccgcgatgctctacctggtcgagcgcggccgctcggtcgctcctatagcgctgttcgtcgtggccggcggcctggtcgagttctgttggccggcgctgctgctggccgcgtctgtctggttgtacctcaagcgcccgacgtgggcggccgcgttgatggcgctgctgtcttgcgcgtccctgtggtacatcaatggcaacctttgggcgcttgctgttgtgcccctggtgatcgtcgccgccggcgtcgatcttcgtgtcccgcgcctgcgctgggccttttacacgtactacccgctgcatcttgccgctctttggctgatccgcattccgatgcgcgaggcgggctacttgtttttcacctgacctttgagattccaatatgcaattgctcaagaaatgcaccatcgcggccctgccgctgctcgccctgtccggctgcgcactgctgaacatccccatgccgacgccgcccggttcgaccccgccggaaatgctgaccgtgccagtggcgcaaatctgccgcgacgctgacaagaaccctgttcgggcaacggagctgtacggcaagaaagggttgtcggccaccggcaaggtgcaggtgatttccgaaggcttcaagcctcgctatcgggtgctgctgcgcgctggcagcgcctcggtccatgctgggaccgataaccagctcgccatcaagtcggtttccaccggccagaccacgcgcgtcactggcaccgtgaaggacgtgtcctacgaccataacggctgctcgatctcgcttgacgatgcgaagttctactgaggggagggcggcggatgctgacacggttgaagggcttccttgctcgtcgccgcgagttgaaggaactggatgtgtccgtggtgagccggccccggccggctccggcggaattggtccaggttgatgcacgcgaggccgtttggcgcgtgccggtgcccggccaggccgaccgcttcatgtcggccaagcctggcgcgatcaacgatgaaatgttcgtggttcgggtggacaccgaagcgttctatcgggcttggctgcgcagcagctcgacgggccgcgaaacgcggtcggacaactgcccgctgcgctcggaaatgccgcaggactacaagttcaagcacgccgtccagggcttcgcgcacggcagggaaaatcctgtgccgctggccttcgccggcgcgcaccaggagcgccaccgggtggacattggtttcagcaacggggtcacgcgctcgttctggctgattgccaacaaggctccgtcgttcccgatccaggtccacggccgggagtcggccgagctgctgaacaaggtttgcggcctcgatcctgcgccgctgtcgttcacggaactgttcgcgcaggcccaacgccaggctccgcaggtcgccacaccggcccggcctgcgccggcagcggccacccggccagctcccaaggtgcagccacgccccggccgaagcggcccgcgcaaaggccgcggactctgactacaaccgtgcgcaaggcgcattagggaggatgtatgtatgtaatcgcctgcggcatcgttgccggcttggcggctgcggtggccctgttgggcttcacgccgatgatggaggcgcttgccgccggcgaacgccgcaaggcactcgcgcaatggacgcggacgatgttcctggtgctgctgcctgtcgtgctgatgtgcgcgcccatcgggtccagcatttacgacgccgtgcaagcggacgctggcaagcccatcgctttccacaacggccggatcacggtcgtcatggccctggtcggcagcttggccgttgtcctggtcgcggctgcgcgtgcggtggtcaaccgcaagcatgccagcttctggttcgtcggctgggtgatggcgtcggttttggccggcggcgtcggcgcgatcgccagcgcgaagcaactggcgttcctcggcgaacatagcggcatggtggccttcggcttcttccgcgaccaggtgaaggacatgcactgcgatgcggacgtgatcctggcccggtgggatgaaaaggcgaactcgccggtggtctaccgctgcccgaaggcgtacctgctcaacaggttcgcatccgcgcccttcgtgccctggccggactacaccgagggggaaagcgaggatctaggtagggcgctcgcagcggccctgcgggacgcgaaaaggtgagaaaagccgggcactgcccggctttatttttgctgctgcgcgttccaggccgcccacactcgtttgacctggctcgggctgcatccgaccagcttggccgtcttggcaatgctcgatccgccggagcgaagcgtgatgatgcggtcgtgcatgccggcgtcacgtttgcggccggtgtagcggccggcggccttcgccaactggacaccctgacgttgacgctcgcgccgatcctcgtagtcgtcgcgggccatctgcaaggcgagcttcaaaagcatgtcctggacggattccagaacgattttcgccactccgttcgcctcggcggccagctccgacaggtccaccacgccaggcacggccagcttggcccctttggcccggatcgacgcaaccaggcgctcggcctcggccaacggcaagcggctgatgcggtcgatcttctccgcaacgacgacttcaccaggttgcaggtccgcgatcatgcgcagcagctcgggccggtcggcgcgtgcgccggacgccttctcgcggtagatgccggcgacgtagtacccggcggcccgcgtggccgctacaaggctctcctggcgttcaagattctgctcgtccgtactggcgcgcaggtagatgcgggcgaccttcaaccttcgtccctccggttgttgctctcgcgtcgccatttccacggctcgacggcgtgcggatcggaccagaggccgacgcgcttgcctcgcgcctcctgttcgagccgcagcatttcagggtcggccgcgcggccgtggaagcgataggcccacgccatgccctggtgaaccatcgcggcgttgacgttgcgcggctgcggcggccggctggccagctccatgttgacccacacggtgcccagcgtgcggccgtaacggtcggtgtccttctcgtcgaccaggacgtgccggcggaacaccatgccggccagcgcctggcgcgcacgttcgccgaaggcttgccgcttttccggcgcgtcaatgtccaccaggcgcacgcgcaccggctgcttgtctaccagcacgtcgatggtgtcgccgtcgatgatgcgcacgacctcgccgcgcagctcggcccatgccggcgaggcaacgaccaggacggccagcgcggcagcggcgcgcagcatggcgtagcttcggcgcttcatgcgtggccccattgctgatgatcggggtacgccaggtgcagcactgcatcgaaattggccttgcagtagccgtccagcgccacccgcgagccgaacgccggcgaaaggtactcgaccaggccgggccggtcgcggacctcgcgccccaggacgtggatgcgccggccgcgtgtgccgtcgggtccaggcacgaaggccagcgcctcgatgttgaagtcgatggatagaagttgtcggtagtgcttggccgccctcatcgcgtcccccttggtcaaattgggtatacccatttgggcctagtctagccggcatggcgcattacagcaatacgcaatttaaatgcgcctagcgcattttcccgaccttaatgcgcctcgcgctgtagcctcacgcccacatatgtgctaatgtggttacgtgtattttatggaggttatccaatgagccgcctgacaatcgacatgacggaccagcagcaccagagcctgaaagccctggccgccttgcagggcaagaccattaagcaatacgccctcgaacgtctgttccccggtgacgctgatgccgatcaggcatggcaggaactgaaaaccatgctggggaaccgcatcaacgatgggcttgccggcaaggtgtccaccaagagcgtcggcgaaattcttgatgaagaactcagcggggatcgcgcttgacggcctacatcctcacggctgaggccgaagccgatctacgcggcatcatccgctacacgcgccgggagtggggcgcggcgcaggtgcgccgctatatcgctaagctggaacagggcatagccaggcttgccgccggcgaaggcccgtttaaggacatgagcgaactctttcccgcgctgcggatggcccgctgcgaacaccactacgttttttgcctgccgcgtgcgggcgaacccgcgttggtcgtggcgatcctgcatgagcgcatggacctcatgacgcgacttgccgacaggctcaagggctgatttcagccgctaaaaatcgcgccactcacaacgtcctgatggcgtacttacccaaagaacagctaggagaatcatttatgctcagcacacttccacaagctcatgcaactttcttgaaccgcatccgcgatgcggtcgcttccgatgttcgcttccgcgctcttctgatcggcggctcttacgttcacggaggactcgatgagcactccgatttggatttcgacatcgttgttgaggacaactgctacgcagatgtcttgtctacacgcaaggattttgccgaggcactgcccggcttcctcaacgcgttcaccggcgaacatgtaggagaaccgcgccttctgatctgcctatatggtccgccactgctacacatcgatttgaagttttctcttgcttccgatctcgaccagcaaatcgagcggcgggcggttctgtttgctcgtgatccggcagagatcgagaagcgcattgaggcggcagcggtggcatggccaaaccgtccctccgagtggttcgaagcacgttgtcagcgccagtgatataagacggtaattcaccatttggattgtccgctccacccaacatgttgtttccttaaggttctcacaccagaaaggacatcaacatgctgagcagagaggacttttacatgataaagcaaatgcgccagcagggcgcgtacattgtcgatattgcgactcagattggttgctctgaacggacggtcagacgctacctcaaataccctgaaccgccagccagaaagacccgccacaaaatggttaagctgaaaccgtttatggattacatcgacatgcgcctggcagagaatgtctggaatagtgaggttatctttgcggagattaaggcaatgggttatacgggcggacgttccatgctgcgttactacatccagcccaaacgtaaaatgcgtccgtcaaaaagaacagttcgcttcgaaactcagcctggataccagctccagcacgactggggcgaagttgaggtggaggttgccgggcaacggtgcaaagttaactttgcggttaatacgctggggttctcccgccgcttccatgtcttcgccgcaccaaaacaggatgctgagcatacctacgaatcactggttcgcgccttccgctacttcggtggttgtgtgaaaacggtgctggttgataaccagaaggctgcggtgctgaagaataacaacgggaaagtcgtgttcaactccggattcctgttgctggccgaccactataacttcctgccacgggcatgccgtccacgcagggccagaacaaaaggtaaggttgagcggatggtgaaatacctcaaggagaacttcttcgttcggtaccgcaggttcgacagcttcactcatgttaatcaacaactggagcaatggatagccgatgtggctgacaaacgggaacttcgccagttcaaagaaacgccggaacagcgcttcgcgctggagcaggaacatctgcagccgttaccggatacggacttcgataccagttacttcgacatccgccatgtgtcctgggacagctatatcgaggttggtggtaatcgttacagcgttcccgaagcgctgtgtggtcagccggtatcgatacgaatatcgctggatgacgagttgcggatctacagtaatgagaaactggtggcctcacatcgcctctgttcggcatcgtctggctggcagacagtgccggagcatcacgccccgctctggcagcaggtcagtcaggtggaacatcgaccactgagtgcctatgaggagctgttgtgatgcatgagctggaagtcctgctgagtcgcctgaaaatggagcatctgagttatcacgttgaaagcctgctggaacaggcagctaaaaaagagctgaactaccgggagttcctgtgcatggcgctacagcaggaatggaacggcaggcatcagcgcggtatggagtccaggctgaagcaggctcgtctgccgtgggtcaaaacgctggagcagttcgactttaccttccagccgggcatcgaccgtaaggttgtccgggaactggctggtctggcgttcgtggagcgcagcgaaaacgtgatcctgctgggacctcctggtgtcggaaaaactcatctggccatagctcttggcgtgaaagcggtggatgcgggacatcgggtactgtttatgccactggacagactgatcgcgacactgatgaaagcgaaacaggaaaaccggctggagcgtcagctgcagcaactgagttatgcccgggtgttgatcctggatgaaataggctatctgccgatgaacagagaggaagccagcctgttcttccggctactgaaccgtcgatatgaaaaagcgagcatcatactgacgtcaaacaaagggttcgcagactggggagaaatgttcggagatcacgtgctggcaacagcgatactggatcggttgctacatcactcaaccacgctgaatatcaaaggagagagttaccggttaaaagagaaacgtaaagctggagtgctgaccaaaaacacaacgccaatcagtgatgatgaaatggtgaaaagcggacagcatcagtaacgaaagtatcttagcgggcatgaaaatggcaaataacggtcaaacatcgtggcgttgacaacgtgcctggatctggctacactatgcggccaccaagctcgcccgtggcgtctttacgaagcgatcggcatgctcggtttccttccgtgagcaagtgttaggacctttgctctaccgtcgcgctggaaaggaccagcgcggagtgaggcgattggaaacccttcgactgggatgaagagcgcagacctagccaccaccattgcgctgcacgatgcgttgtctgtcagggatgccatcaaagcatctgcctccatctatctcgacctccgagccgccgatccgtcgttggaaccgacaacgcatatgccaggtcttctgtacgacttaatagaacgtgcggtaccaggcacgcctaaccgtcagtgagattggatgagtgaacgatattgatcgagaagagccctgcgcagccgctgccgtgcccgagagcatggcggctcacgtgatgggatacaaatgggcgcgtgataaggttggtcagtccggctgcgcggtctatcggctgcatagcaagtcaggcggctccgacttgtttctgaagcacggcaaagatgcttttgccgacgacgtgactgatgaaatggtgagattgcgttggctggcggggcacatttctgtgccctccgttgtaagcttcgacattcgcacgcccaatcaggcatggctcctgacaacagcaatacatggaaaaacggcatatcaagtgctgaaatcggatttcggagcccgtctcgttgttgttgacgcattggcggcgttcatgcgccgactgcatgcgatcccagtgagcgaatgctccgttcaacagtggaccacgcatgcaggcttgcccgagcgcgggagtatcgaggcgggggttgttgatgtcgatgacttcgataaggagcgcgaagggtggacggccgaacaggtttgggaggcgatgcatcgcctcctaccgctcgcgccggacccagtcgtgacgcacggcgatttttcactcgataatctacttatcgtcgaaggtaaggtagtcggctgcatcgacgttgggcgggctggtattgctgatcgataccaagaccttgccgtgttatggaactgtcttgaggagttcgaaccttcgcttcaggagaggcttgttgcgcaatatggcattgccgatccggataggcgcaagctgcaatttcatctcctgctggacgaacttttctaaggcgatgccccctcgacctcgatcagggaggcgttcaggacgactcacaaagaaagccgggcaatgcccggctttttctgctgctacctccgtagtcgtaaggtcgttgcaggtgctcgggtgcggtacaactcgccggtcgccagctcaagcgcgatcacgtcgttgccgtcgtagttgacgatgatgctgttgggccgactgtcctcacgcttcgcagggagaggccagccttcaatcgaagccggcgcaagctcgtagtgcttcccggtttcgacgctgcgcagcgtccaggtcctgcaaccggccacgccggtcgcagaaaccacggcgagcgagccgcgaaaatcgtgcgggtacgcctcgatgttcatacgcctcctagatcgagcgcgagcgtttctgctcggccttggccgcctgttcctgggacacctcgccgatgaccttgccctggccccggctgtaggcgatttcgtagttcttgccgacaaccggcggcttctcaaagatgccccggctgtgtttcacgatcccgccttcgctgaactggtagacgttgcgcccatcgtcgtgcagcacctggccgacgtgcttgtgcgggtggacgtttttgcttgcgtccttcgcatcgctcaactggtgaatgcctttcggtagccccgcctcgggcaacaccttcatggtcagccattcgccgttcactacctggtccacctggcggctgccgttcatgacggcgatcttgacgctgccctcgggtttcatgatgacgccagggcttgccgatgtgcgtggtgccccgatctgtactttgttcatacgctctagttctccttagtaggttctcgcgcggcgttgccgctgttcttgctgctcgatgtcttgctgcttgagctgctgcaccttctgccgctggccctcgtcgagaagcaccttgccgacagcacttctcacctggcgttcaaccccgtccttgcccaggctgctgcgctcggacaggtcgttgaaatcggtgtgcttcttcatgttcgacagggcggcgagctggccatcgttcaacagcgattccttgagcttggccgtgtcggcctcgctcaactggaccttgccggccgccgcgtccgcgaggcgcttttcagcgtgcaaatggttgcggtagttctccggggtgatcggcggcagctccttcgggtaggcgttctcgcccggcgcgaagattgggaagatggccttgccgccgaccgccttggcggcctcctgtgccttcgtcctgccgggattcacgccctgggtgatctgcacctggcggtcgtcgtcgccggcgatcacaacgggcttgtccgggaatttcgcgtgcagggcctcggcaacagcctgtaggttgccggaatcgaacgcggcgacagtcgcgtgccccagcgcttcggccactgtggcggcggtggcatagccttcgccgatcaccagcgccggcgcggccgcgagcgcatccatgccaccgacgacatggaagcatccttccttgcggctgtccttggcgaagcgcttggtgccgtcctcctggatgtactgcatggtccattgcttgccgtcggcgtcgtaggccgggatgtaggttttctggccctcctggtcggtaaggacgccggcgtgcacctgtagacccttgtcgcgcaggtacggcgtcggttccgtgatgggaaccaggctttgcgcctggcggccgatgcgctgcgccgtggcttcgtgctggcgttcttgttcctcggcacgcgcggccagcttggccgccgcctcggcctgcatcttggccttctcggcggggtccagggcgtagcccttggccttccacttcatttcgacgccggtgcggttgtttttgatgtaaccggccgggtggccgtcgaggtggccgacgtagaagcccgacttctcgcccttcttgtcgccctcggtctcgatgcggtgcttcttgccgtccatgatggggtgctcgccgcctggggtgacgacgcagcccatgcttttcagggcctccgcgaactcatcttcgggggtgacggccggggattgctgggtgggcacgttgtccggcagccagcgttgcagcttgcccatgtcggcgttcggtccggcgtaccaggacttggccaccttgtcccactgcgcgccggccgccttggcaacctggcgctcgccgtagggcacggccaggtagacgcgctcctgggccgcgttggggcgctcggccgtgggttgggtaggctgggcctcggcgcgggcctctacggccgctgtagcgccctcgcgcgcccatttggcgaacggggcagggtcaacccctgccggaacgtaccaggcgcgttcctggcggtcccagcgcgctccaagggccttcacctcgtctttctccttgaacggcacgttcaagtaggcgcgctcgggcttggcgggggcttgagcggccgccggctgctcggcggcgttcatggcctgggccatttcctgctgctcgcgctcgtagtcggcgatccggcgctgtaggtcctcgtcgtgcagcatggccgtgccctcggcggccttgcgcgcctccttggcggcaacgcggtcctcgtcggtgctgttgggatcgcggcgaactcgctcttcatggatgcgggcgaacttcgcggcctgctcgtactcgttggccgtcgcgtaagcgtcgatcacggccaggcggtcggcgagcgcttcggcattggtctgcgcgtcggggccggcgaagtcggcaagccattggtggccgccccacgcatggttcgcatagacgccccaaaactccggctctcggtcgccggccggcaccacggaccgttcgccgtcgtgctcgacctcgacgttggcctggacctggacgcggccggtccaatcggcaggcagctcaaagcccagcgtggtttcggtcagcgcggccagcgattggttgccttccgccggctccgcgccggcgcggtacatgcgcagggtctgcgcgatcagctcgtcggccggcgcaatggccggtcgtgccacctggtcttgctgttgctccatagttgccccctgcgcaggctcgatggcctgctgggtcgtttgttcttgaatttgcttctgctcgaacgccaggacgaaatcctggatcttctccgcgtcggcggccgcgcggaaaatctctagcgggtcctcttgtagcgccttgatccacgatccgacataggccgcgtgctggccggggtcgtggccgatgcccagctcgtcgcccaggatcatgctggcaatctcggcccgcagctcttccttggcgtacccctcgctcccgaagggatgcgccaggtcgcggtccagccgcgacgggtggccggtccagtgccccagctcatggagcgcggttgcgtagtagttgtcggcgctcgggaactggcctttgtcgggcagatggatgctgtccgtggacggccgataaaacgcgcggtcgtgctcgccgtggcggatggtggcacctgacgccgcaaggatgtgctcggcccgctcgacggcgctccaagtctgttccttgcgttccaacggcggcaggccgtcgatctgctccgcattgaacacggtggcgaagaacacgcgcgggcgttcgagctgcaccgtcaccttgaccggatcgccgttggcatcgaggaccggcttgccggtctgctcgtcggtcttggtctgctcttcgctgaacttccaatactggatcggcgtgcctttctcgccgcgacgcacctgtgcgccggcggcagcggcctgcttgtaggtcatccagcgcgggtccgcatggccctgggccatgagctgaatcgcgttgatgcccttgtaacgcttcccggtagtcgggttgagcgggatgaaggagccgggcatgcccggttcccacggtttttgccacggcgcagtgccggctttcagttgctcaatgaggcgttcggcaacctgctcgtggaacggctttttgacctctgccatagccaattacctcccgtcattggcggccgcggtcgtcgtgtcctcgggcacggtcgcgtccaccaggtcaatgtcgctctcggcggcgtcctgctcgctcaaggcgtcctcggggaaggccccggccttctccgcttcttccgggtcgaactcgacctggaagccgggcgtcatcgcatcggcgagcttttcacgcagggcggcggcggcgttcgcggtatcgtcgaacggcgcaaagtcgtcctgctgcacggtcttgggatcattcatcgctttcactcctggttggtgccgttacggcctttgctgtagtccggcctgcctttcaggtcggggtatgtctgcttgcacgtcgggaagttgctgcacccccaccagaacatgccgcgcttcttgccaggccgacgggaaaggccgtggccgcaggccatgcacttgtgcagctcggagactttcggggcctcgcgcgggacgggcttgccgcccttgtcgtcgcacgcgaacttgcagccgtcggcaaagccggtgcagccccaaaagtattcgttcttgtccttcttcttgaggcgtcgcagcggcttgccgcaggacgggcaagggtgcgtgtcgatcttcatgttgaggccgttgtctttgatgttggcgacctcggcgccgatgtattccatcagctcgttgacgaacgacagcgtgtcgcgctcgccggcctggatggccttctgctgctcatgccagagcgcggtcatgtcggggaatctggccgtgtcgggcagtgcgtcgtacagctcttcgccggtcggcgtggacacgatgtgcttgcccttctccaccaggtagccgcgctcgaaaagcgtggcgatgatggagtctcgcgttgccggcgtgccgatcccgccgtgctcgccttgcttgcccttgtccttttcgatcaagattttccgcaggcggtcatcgcggatgtatttcgcaacgcgggtaaggtccgacagcagagattccatcgtgtacagcggctgcggtttcgtctcctgctgctcggccttcgcatcggtgcaggtgccggcctggccgtcacgcagcttgcgcaggtcctgttcaatgtcgtcggcattgccttccaggtcctcgttgccggcgtcgttcttgtagagaatcttccagcccggcgacgtggtgacgttcgagcgcacgccgaaacgatgatcgccgacctgggcaagcacgtcggtctggtcatacagatgcttcggccagaactgcgcgacgtaggcgcgcgcgatcagcaggtaaatcttctgctcggcatcggtgagcttcgacaggtcggccgtgctttcggtcgggatgatcgcgtggtgcgcggaaaccttggacgagttgaaggcgcggctcttgatcgtcggattggcgcgctgcgcagcagcggccagcatgggggccgtctgtgcgatggccgccagcacgcccggcgcatcgccgtgctgttcctcgctcaagtattcgcagtcggaacggttgtaggtgatgagcttgtgcttctcgcgcagggcctgcgtaatgtccttcacctggtccggcttgaagccgaacttgcgcgaggcgtccatttgcagtttcagcaggttgtagggcagcggcgcagccgcttccttcgccttggtggtcacggacacgatgcgggcgggttggccgctcacggcggccgcgatgccctcggcgtgctccttgttgctgaggcggcctttctcgtccaccggatcgccgtcggcgacctggtaacgggccgggaactgaatgccctcgacctcgaactggccgttcaccaggtagtagtaggttttctggtgggccgcgttctcgcggcaacggcgcacgacaaggcccaggatcggagtctgcacgcgccccacgctcaacagcccctgatagcccttcgcgcgtgccgcaagcgtgtacaggcgcgtgatgttgaagccgtatagctggtcgccgacgctgcgggcctcggccgcagcggacaggccggcgaactcgcggttgtcgcgcatcgcggcgagctgccggcgcacgatcttcacgttgttgtcgttgataagcagccgctgcaccggcagacggcagttggcgtattccaggatttcatcgaccagaagctggccttcgtcgtccgggtcgccggcgtgaaccacgcttttcgcctgcttcaacaggctgaggatggtcttgaactgagctttcgcaccggcatcgccggacggtttcttgcgccagggaatatggacgatgggcaggtcggccatgttccagttggcgtagcgctcgtcgtagtcctccgggtctagcaaggccagcatgtgaccgtagcaccaggtcacgcggtcggagccgcattcgtaatagccgtccttgcggctgccgccgcccaggccctcgacgatggcttttgccagctccggtttttcagcgattacaaggcgttcaaattgcatatatccccctaccctcaccaggtcagaaccggcctgatgacggtgatgatttgcgaacgattgacaggcccgaagtagcggccgtcgaaagacgtgtcgcttacgtcggacataagcagaacctcggcggtccccagggtgtagctgtcggactgataacgaggcagcggccgtcctgatggatcggccttgatgagcgcgctgtgaggcagcagcccgccattcacgcgcacgccggcgtcggtgatggcaacctcgtcgcctttagcggctaaaactcgcttcatcatgtagccgtagtcgccggggcagaaaccgccggcgatgtagccccgctccttggcgtccgaaaacacgccgacttgcggcgggcagaacatgacgtaagcccccttctccaccggcgcattcgatttccagtacaggccgaccggaatgcttttggtggtgttgaccttcgcgccggcgagataggccgcgccggcgagcaacaaggccgcgccgcctccgatggcgacgtacttggtgaggcgctggaagcggctcatatcgtgatcccctccccttcctcgacggtggccgtctggatcagcttgtcgctgaccttcggagccggtacggccgcgcgggcctggaatatcgggtctttgaagtagagcggctgcttgccgtagatcgcgggatagccggcgacgtacacaaccatgtcgcccgcctcttcaatgctgccgtcggcgctcttcttcggccccggcatgcgcaggcattcatcgggggtcagcaatggccgctgcacttcctggaaggtccgcgagacgttgcccaacagcgccgacgtgcggcggccgctcgtcgtgatctgctccttcacgatggtcgtggtgcctgtcagttttgacaggtgctcggccgtctccacgcggttcggcgggtaggcgttctgcacgtggcagttcgacgtgatgctttcgtcgtggccgtagccggtttcgcggctcttgagctggttaatgtcctggcagatgaggtagcacttgatgccgtagccggcgacgaaggcaagggactcttgcaggatttcgagcttgcccaggctggggaactcgtcgagcatcatcagcagacgatgcttgtagtgcgcgacaggacggccgttctcgaagtccatcttgtcggccagcagccggacgatcatgttgaccatgacgcgcaccagaggccgcagacgggccttgtcgttgggctgcgtcacgatgaacaggcttaccgggtcgtcgtggtgcatcagttgcttgatgcggaagtcggacttgctgacgttgcgggccacaaccgggtcgcggtacagggccaggtaggacttggcggtggacagcacggaaccggattcttcctccgggcggtccatcatgtcgcgggccgcagagccgaccgcagggtggttctgcccgtcaacgtggccgtaggtggtcatttccatccaaagctcgcccacgtcgcggttcgggtcggcaagcatgccgtccaccgacggcagggtggccggcgtaccctcgttcttagccttgtagagcgcgtgcaggatgacgccgacaagcagcgcctggctggttttctgccagtgcgattccaggcccttgccgtccggatcgacgatcagggtggcaaggttctgcacgtcgccaacctcgtactcggtccccaagcggatttcatcgagcgggttccagcacgcgctaccctgcgcggatgccggctcaaagcgcacgaccttgttgcgggcatgcttcttccgccagccggcggtcagcgcccacaactcgcctttcaggtcggtgatgacggcgctgtgcgcccaggaaagcagcgtcggaacgaccaggccgacgcccttgccggagcgcgtcggcgcgtaggtcaagacgtgctcggggccgttgtgccgcaggtagtggaacttgccgtccttgtcctgccagccgcccacatagacgccgctggaagtgggcgggtgtttgcctgacaccagctcgacgacggtgcgcggccggggcagcaggccggcggcctgtatgtccttcttgtcggcccagcgggccgaaccgtgcagatagtcgttcgccttgccggtgttcgccttgaccatctgcgtgacggccgtgcccagcaggcccacggtcgaaacgaccatacccatgctggccgcgcgcatgaaatcgtcgggatattggccgtaccacttgccggcccattgaaggatcgaccagggcgtgtagacgtggttgatattccagccaagtccggcctgatactggaaggaatgggcgaaatattgcgtcgcggtctgcaagcctgccccaagggacaggccggcgaggatgggaacggtcttgctggccttcggttttttcgcccgtatctgtggccccacggcgttgtttcggttcttcatctactcctacctcgggtagttttaagggagcctcgcggggtcacggtgacgggatcaccgatggcgaggcgcttcatgcgttgcaccgtggccttatcgacgggcagcaccagaatctcgtcgttttctttcctcaacagggccagcgcctggtcctcgacgttccgggtgcctgcataggacagcgcaccaacataatcagtatatcgtgcatgcttcggtatatcgaagccgtttagccgcttttgctcgcgctcggcaacatatttctcggccgccgcgatctgttcgggctttagccctcttcctggcccagaaactccccgtcgcagtgcgtgagctggttcggctccttgctgctccacgtgaccaggaacatcacgcggcaatagcatttcagctccgccggcgatgcgaaccacaccgagttgggacagcgctcgcaaacggttttggctttggggcggcggctttcgtccaatgcgtccaacgttgggcttgcggagtgcgacggttccgccggcgctgacggcgcgagcgtcccgtcggtcgccgtcgccgcctgtggcgttgagggtggttctggctgcggcaggtcgaatgcctccatcgccgccgcgatctcttcgtccgtcatttcgttcgggttgctcatgtgcttgctccttcgtcagtagttcttgacggcggcgctcaagggcggcgtcgtcaaaggtgattgccagacggccagcggcggccgcctgcgcgatccgctccttgaactctgctgtgccgttgacggtgatccggtcgccgaagcgctccattgccaggcgcagggcggcgtccaggccgtccgtggtggcctcgcgcgagacttgcaggcggtcgccgtcgtcgcggacggcgctgctgccgacgcgatagatgatggttcccttcttcgtgatgttgtccgtcacggccgcatggcccggcttggcctcgccgctgccctggatggtgttgcccttgaggtcgctgcggccctcgcgtgcgcgcagcgcggccagggccttgtcgtcgcccttcatcgcctcggccttgagccagtcggcccacgcgcggcgctgcgtgcgctcctggaccgcctgacggccctgccggtactcgcggttgatcttgtccaggtcggcgcgcagagccttgtgcgcctgcgcgtacatcagtcgctttgcaatgcgcccctcgcccagcagcttgatagcggcgcggcgcagccggttgctgcgcatcgcggcttcaatcaggcggtcacgacgccggcgcagcgtgtccagctcgcccttgcgcacggcccccatttcctggcgttcagactgataccgggcgtatagctcggtggtgtcgatgcgggtcttgagcggcttcgctcgatactcccgccgccggggggcttcgccgccctcggctggcgtgaatgccccgaatcgggcttcgagcttcggcttggacaggtcgcgcgaaacggtgctggccttgaccgtcgtgccgtcgccggcctcgaagatgaagccgtttccgcgctcgcgcagcttaagcccgttttcccgcaggacgcggtgcaggtcctcccaggattgcgccgcttgcagctccggcaggcattcgcgcttgatccagccgaccaggctttccacgcccgcgtgccgctccatgtcgttcgcgcggttctcggaaacgcgctgccgcgtttcgtgattgtcacgctcaagcccgtagtcccgttcgagcgtcgcgcagaggtcagcgagggcgcggtaggcccgatacggctcatggatggtgtttcgggtcgggtgaatcttgttgatggcgatatggatgtgcaggttgtcggtgtcgtgatgcacggcactgacgcgctgatgctcggcgaagccaagcccagcgcagatgcggtcctcaatcgcgcgcaacgtctccgcgtcgggcttctctcccgcgcggaagctaaccagcaggtgataggtcttgtcggcctcggaacgggtgttgccgtgctgggtcgccatcacctcggccatgacagcgggcagggtgtttgcctcgcagttcgtgacgcgcacgtgacccaggcgctcggtcttgccttgctcgtcggtgatgtacttcaccagctccgcgaagtcgctcttcttgatggagcgcatggggacgtgcttggcaatcacgcgcaccccccggccgttttagcggctaaaaaagtcatggctctgccctcgggcggaccacgcccatcatgaccttgccaagctcgtcctgcttctcttcgatcttcgccagcagggcgaggatcgtggcatcaccgaaccgcgccgtgcgcgggtcgtcggtgagccagagtttcagcaggccgcccaggcggcccaggtcgccattgatgcgggccagctcgcggacgtgctcatagtccacgacgcccgtgattttgtagccctggccgacggccagcaggtaggccgacaggctcatgccggccgccgccgccttttcctcaatcgctcttcgttcgtctggaaggcagtacaccttgataggtgggctgcccttcctggttggcttggtttcatcagccatccgcttgccctcatctgttacgccggcggtagccggccagcctcgcagagcaggattcccgttgagcaccgccaggtgcgaataagggacagtgaagaaggaacacccgctcgcgggtttagccctcccacacataaccagagggcagcaattcacgaatcccaactgccgtcggctgtccatcactgtccttcactatggctttgatcccaggatgcagatcgagaagcacctgtcggcaccgtccgcaggggctcaagatgcccctgttctcatttccgatcgcgacgatacaagtcaggttgccagctgccgcagcagcagcagtgcccagcaccacgagttctgcacaaggtcccccagtaaaatgatatacattgacaccagtgaagatgcggccgtcgctagagagagctgcgctggcgacgctgtagtcttcagagatggggatgctgttgattgtagccgttgctctttcaatgagggtggattcttcttgagacaaaggcttggccatggtttagttcctcaccttgtcgtattatactatgccgatatactatgccgatgattaattgtcaacacgggctgacgccgttggatacaccaaggaaagtctacacgaaccctttggcaaaatcctgtatatcgtgcgaaaaaggatggatataccgaaaaaatcgctataatgaccccgaagcagggttatgcagcggaaaagcgctgcttccctgctgttttgtggaatatctaccgactggaaacaggcaaatgcaggaaattactgaactgaggggacaggcgagagacgatgccaaagagctacaccgacgagctggccgagtgggttgaatcccgcgcggccaagaagcgccggcgtgatgaggctgcggttgcgttcctggcggtgagggcggatgtcgaggcggcgttagcgtccggctatgcgctcgtcaccatttgggagcacatgcgggaaacggggaaggtcaagttctcctacgagacgttccgctcgcacgccaggcggcacatcaaggccaagcccgccgatgtgcccgcaccgcaggccaaggctgcggaacccgcgccggcacccaagacgccggagccacggcggccgaagcaggggggcaaggctgaaaagccggcccccgctgcggccccgaccggcttcaccttcaacccaacaccggacaaaaaggatctactgtaatggcgaaaattcacatggttttgcagggcaagggcggggtcggcaagtcggccatcgccgcgatcattgcgcagtacaagatggacaaggggcagacacccttgtgcatcgacaccgacccggtgaacgcgacgttcgagggctacaaggccctgaacgtccgccggctgaacatcatggccggcgacgaaattaactcgcgcaacttcgacaccctggtcgagctgattgcgccgaccaaggatgacgtggtgatcgacaacggtgccagctcgttcgtgcctctgtcgcattacctcatcagcaaccaggtgccggctctgctgcaagaaatggggcatgagctggtcatccataccgtcgtcaccggcggccaggctctcctggacacggtgagcggcttcgcccagctcgccagccagttcccggccgaagcgcttttcgtggtctggctgaacccgtattgggggcctatcgagcatgagggcaagagctttgagcagatgaaggcgtacacggccaacaaggcccgcgtgtcgtccatcatccagattccggccctcaaggaagaaacctacggccgcgatttcagcgacatgctgcaagagcggctgacgttcgaccaggcgctggccgatgaatcgctcacgatcatgacgcggcaacgcctcaagatcgtgcggcgcggcctgtttgaacagctcgacgcggcggccgtgctatgagcgaccagattgaagagctgatccgggagattgcggccaagcacggcatcgccgtcggccgcgacgacccggtgctgatcctgcataccatcaacgcccggctcatggccgacagtgcggccaagcaagaggaaatccttgccgcgttcaaggaagagctggaagggatcgcccatcgttggggcgaggacgccaaggccaaagcggagcggatgctgaacgcggccctggcggccagcaaggacgcaatggcgaaggtaatgaaggacagcgccgcgcaggcggccgaagcgatccgcagggaaatcgacgacggccttggccgccagctcgcggccaaggtcgcggacgcgcggcgcgtggcgatgatgaacatgatcgccggcggcatggtgttgttcgcggccgccctggtggtgtgggcctcgttatgaatcgcagaggcgcagatgaaaaagcccggcgttgccgggcttgtttttgcgttagctgggcttgtttgacaggcccaagctctgactgcgcccgcgctcgcgctcctgggcctgtttcttctcctgctcctgcttgcgcatcagggcctggtgccgtcgggctgcttcacgcatcgaatcccagtcgccggccagctcgggatgctccgcgcgcatcttgcgcgtcgccagttcctcgatcttgggcgcgtgaatgcccatgccttccttgatttcgcgcaccatgtccagccgcgtgtgcagggtctgcaagcgggcttgctgttgggcctgctgctgctgccaggcggcctttgtacgcggcagggacagcaagccgggggcattggactgtagctgctgcaaacgcgcctgctgacggtctacgagctgttctaggcggtcctcgatgcgctccacctggtcatgctttgcctgcacgtagagcgcaagggtctgctggtaggtctgctcgatgggcgcggattctaagagggcctgctgttccgtctcggcctcctgggccgcctgtagcaaatcctcgccgctgttgccgctggactgctttactgccggggactgctgttgccctgctcgcgccgtcgtcgcagttcggcttgcccccactcgattgactgcttcatttcgagccgcagcgatgcgatctcggattgcgtcaacggacggggcagcgcggaggtgtccggcttctccttgggtgagtcggtcgatgccatagccaaaggtttccttccaaaatgcgtccattgctggaccgtgtttctcattgatgcccgcaagcatcttcggcttgaccgccaggtcaagcgcgccttcatgggcggtcatgacggacgccgccatgaccttgccgccgttgttctcgatgtagccgcgtaatgaggcaatggtgccgcccatcgtcagcgtgtcatcgacaacgatgtacttctggccggggatcacctccccctcgaaagtcgggttgaacgccaggcgatgatctgaaccggctccggttcgggcgaccttctcccgctgcacaatgtccgtttcgacctcaaggccaaggcggtcggccagaacgaccgccatcatggccggaatcttgttgttccccgccgcctcgacggcgaggactggaacgatgcggggcttgtcgtcgccgatcagcgtcttgagctgggcaacagtgtcgtccgaaatcaggcgctcgaccaaattaagcgccgcttccgcgtcgccctgcttcgcagcctggtattcaggctcgttggtcaaagaaccaaggtcgccgttgcgaaccaccttcgggaagtctccccacggtgcgcgctcggctctgctgtagctgctcaagacgcctccctttttagccgctaaaactctaacgagtgcgcccgcgactcaacttgacgctttcggcacttacctgtgccttgccacttgcgtcataggtgatgcttttcgcactcccgatttcaggtactttatcgaaatctgaccgggcgtgcattacaaagttcttccccacctgttggtaaatgctgccgctatctgcgtggacgatgctgccgtcgtggcgctgcgacttatcggccttttgggccatatagatgttgtaaatgccaggtttcagggccccggctttatctaccttcgtggttcgtccatgcgccttggttctcggtctcggacaattcttttgcccattcatgaccaggaggcggtgtttcattgggtgactcctgacggttgcctctggtgtttaaacgtgtcctggtcgcttgccggctaaaaaaaagccgacctcggcagttcgaggccggctttccctagagccgggcgcgtcaaggttgttccatctattttagtgaactgcgttcgatttatcagttactttcctcccgctttgtgtttcctcccactcgtttccgcgtctagccgacccctcaacatagcggcctcttcttgggctgcctttgcctcttgccgcgcttcgtcacgctcggcttgcaccgtcgtaaagcgctcggcctgcctggccgcctcttgcgccgccaacttcctttgctcctggtgggcctcggcgtcggcctgcgccttcgctttcaccgctgccaactccgtgcgcaaactctccgcttcgcgcctggtggcgtcgcgctcgccgcgaagcgcctgcatttcctggttggccgcgtccagggtcttgcggctctcttctttgaatgcgcgggcgtcctggtgagcgtagtccagctcggcgcgcagctcctgcgctcgacgctccacctcgtcggcccgctgcgtcgccagcgcggcccgctgctcggctcctgccagggcggtgcgtgcttcggccagggcttgccgctggcgtgcggccagctcggccgcctcggcggcctgctgctctagcaatgtaacgcgcgcctgggcttcttccagctcgcgggcctgcgcctcgaaggcgtcggccagctccccgcgcacggcttccaactcgttgcgctcacgatcccagccggcttgcgctgcctgcaacgattcattggcaagggcctgggcggcttgccagagggcggccacggcctggttgccggcctgctgcaccgcgtccggcacctggactgccagcggggcggcctgcgccgtgcgctggcgtcgccattcgcgcatgccggcgctggcgtcgttcatgttgacgcgggcggccttacgcactgcatccacggtcgggaagttctcccggtcgccttgctcgaacagctcgtccgcagccgcaaaaatgcggtcgcgcgtctctttgttcagttccatgttggctccggtaattggtaagaataataatactcttacctaccttatcagcgcaagagtttagctgaacagttctcgacttaacggcaggttttttagcggctgaagggcaggcaaaaaaagccccgcacggtcggcgggggcaaagggtcagcgggaaggggattagcgggcgtcgggcttcttcatgcgtcggggccgcgcttcttgggatggagcacgacgaagcgcgcacgcgcatcgtcctcggccctatcggcccgcgtcgcggtcaggaacttgtcgcgcgctaggtcctccctggtgggcaccaggggcatgaactcggcctgctcgatgtaggtccactccatgaccgcatcgcagtcgaggccgcgttccttcaccgtctcttgcaggtcgcggtacgcccgctcgttgagcggctggtaacgggccaattggtcgtaaatggctgtcggccatgagcggcctttcctgttgagccagcagccgacgacgaagccggcaatgcaggcccctggcacaaccaggccgacgccgggggcaggggatggcagcagctcgccaaccaggaaccccgccgcgatgatgccgatgccggtcaaccagcccttgaaactatccggccccgaaacacccctgcgcattgcctggatgctgcgccggatagcttgcaacatcaggagccgtttcttttgttcgtcagtcatggtccgccctcaccagttgttcgtatcggtgtcggacgaactgaaatcgcaagagctgccggtatcggtccagccgctgtccgtgtcgctgctgccgaagcacggcgaggggtccgcgaacgccgcagacggcgtatccggccgcagcgcatcgcccagcatggccccggtcagcgagccgccggccaggtagcccagcatggtgctgttggtcgcccccggccaccagggccgacgtgacgaaatcgccgtcattccctctggattgttcgctgctcggcggggcagtgcgccgcgccggcggcgtcgtggatggctcgggttggctggcctgcgacggccggcgaaaggtgcgcagcagctcgttatcgaccggctgcggcgtcggggccgccgccttgcgctgcggtcggtgttccttcttcggctcgcgcagcttgaacagcatgatcgcggaaaccagcagcaacgccgcgcctacgcctcccgcgatgtagaacagcatcggattcattcttcggtcctccttgtagcggaaccgttgtctgtgcggcgcgggtggcccgcgccgctgtctttggggatcagccctcgatgagcgcgaccagtttcacgtcggcaaggttcgcctcgaactcctggccgtcgtcctcgtacttcaaccaggcatagccttccgccggcggccgacggttgaggataaggcgggcagggcgctcgtcgtgctcgacctggacgatggcctttttcagcttgtccgggtccggctccttcgcgcccttttccttggcgtccttaccgtcctggtcgccgtcctcgccgtcctggccgtcgccggcctccgcgtcacgctcggcatcagtctggccgttgaaggcatcgacggtgttgggatcgcggcccttctcgtccaggaactcgcgcagcagcttgaccgtgccgcgcgtgatttcctgggtgtcgtcgtcaagccacgcctcgacttcctccgggcgcttcttgaaggccgtcaccagctcgttcaccacggtcacgtcgcgcacgcggccggtgttgaacgcatcggcgatcttctccggcaggtccagcagcgtgacgtgctgggtgatgaacgccggcgacttgccgatttccttggcgatatcgcctttcttcttgcccttcgccagctcgcggccaatgaagtcggcaatttcgcgcggggtcagctcgttgcgttgcaggttctcgataacctggtcggcttcgttgtagtcgttgtcgatgaacgccgggatggacttcttgccggcccacttcgagccacggtagcggcgggcgccgtgattgatgatatagcggcccggctgctcctggttctcgcgcaccgaaatgggtgacttcaccccgcgctctttgatcgtggcaccgatttccgcgatgctctccggggaaaagccggggttgtcggccgtccgcggctgatgcggatcttcgtcgatcaggtccaggtccagctcgatagggccggaaccgccctgagacgccgcaggagcgtccaggaggctcgacaggtcgccgatgctatccaaccccaggccggacggctgcgccgcgcctgcggcttcctgagcggccgcagcggtgtttttcttggtggtcttggcttgagccgcagtcattgggaaatctccatcttcgtgaacacgtaatcagccagggcgcgaacctctttcgatgccttgcgcgcggccgttttcttgatcttccagaccggcacaccggatgcgagggcatcggcgatgctgctgcgcaggccaacggtggccggaatcatcatcttggggtacgcggccagcagctcggcttggtggcgcgcgtggcgcggattccgcgcatcgaccttgctgggcaccatgccaaggaattgcagcttggcgttcttctggcgcacgttcgcaatggtcgtgaccatcttcttgatgccctggatgctgtacgcctcaagctcgatgggggacagcacatagtcggccgcgaagagggcggccgccaggccgacgccaagggtcggggccgtgtcgatcaggcacacgtcgaagccttggttcgccagggccttgatgttcgccccgaacagctcgcgggcgtcgtccagcgacagccgttcggcgttcgccagtaccgggttggactcgatgagggcgaggcgcgcggcctggccgtcgccggctgcgggtgcggtttcggtccagccgccggcagggacagcgccgaacagcttgcttgcatgcaggccggtagcaaagtccttgagcgtgtaggacgcattgccctgggggtccaggtcgatcacggcaacccgcaagccgcgctcgaaaaagtcgaaggcaagatgcacaagggtcgaagtcttgccgacgccgcctttctggttggccgtgaccaaagttttcatcgtttggtttcctgttttttcttggcgtccgcttcccacttccggacgatgtacgcctgatgttccggcagaaccgccgttacccgcgcgtacccctcgggcaagttcttgtcctcgaacgcggcccacacgcgatgcaccgcttgcgacactgcgcccctggtcagtcccagcgacgttgcgaacgtcgcctgtggcttcccatcgactaagacgccccgcgctatctcgatggtctgctgccccacttccagcccctggatcgcctcctggaactggctttcggtaagccgtttcttcatggataacacccataatttgctccgcgccttggttgaacatagcggtgacagccgccagcacatgagagaagtttagctaaacatttctcgcacgtcaacacctttagccgctaaaactcgtccttggcgtaacaaaacaaaagcccggaaaccgggctttcgtctcttgccgc

SEQ ID NO: 321 - DNA, 80 bp, Artificial Sequence
  Oligo for amplifying selection cassette for recombination
ctggagtaacagtacatcattttctttttttacagggtgcatttacgcctatgggcctggtgatgatggcgggatcgttg

SEQ ID NO: 322 - DNA, 74 bp, Artificial Sequence
  Oligo for amplifying selection cassette for recombination
gctcgcctgaagttggcttattgcttcacgtaaccagtgttgatattccatcagaagaactcgtcaagaaggcg

SEQ ID NO: 323 - DNA, 107 bp, Artificial Sequence
  Oligo for amplifying selection cassette for recombination
cgtcacttgaacaaaattgcacggacagggactgttaaaatgccaaatttcctggcatcatggcaaccatctgaaaagcttgagcacgtgttgacaattaatcatcg

SEQ ID NO: 324 - DNA, 104 bp, Artificial Sequence
  Oligo for amplifying selection cassette for recombination
ccttcaagaatattctacgattgttctgtttaggaaaagcaaggcgggaagtcgggagataagtcattgataaagttattcctttgccctcggacgagtgctgg

SEQ ID NO: 325 - DNA, 110 bp, Artificial Sequence
  Oligo for amplifying selection cassette for recombination
cttttggctgtttttcaggcaaacaaacaaattaggggtttacacgccgcatcgggatgtttatagtgcgcgtcattcaagcttgagcacgtgttgacaattaatcatcg

SEQ ID NO: 326 - DNA, 104 bp, Artificial Sequence
  Oligo for amplifying selection cassette for recombination
gcaaatataacgccctgagaatttcgacaggcaaaagaaaaaggggttagcatttagctaaccccttatcttattttattcctttgccctcggacgagtgctgg

SEQ ID NO: 327 - DNA, 83 bp, Artificial Sequence
  Alternative recoding mutagenesis oligo
aaaatgaatttgtgattaatcaaggcgaggggacaggtggcagaagctaaaagcttgagcacgtgttgacaattaatcatcgg

SEQ ID NO: 328 - DNA, 79 bp, Artificial Sequence
  Alternative recoding mutagenesis oligo
gcgtctggcacccacggagcaagaaggtcgcgcaaattacgatctgccacttattcctttgccctcggacgagtgctgg

SEQ ID NO: 329 - DNA, 22 bp, Artificial Sequence
  Alternative recoding mutagenesis oligo
aaaaaggtcgggccggacggtc

SEQ ID NO: 330 - DNA, 23 bp, Artificial Sequence
  Alternative recoding mutagenesis oligo
gcaataatggcagccacaccttg

SEQ ID NO: 331 - DNA, 90 bp, Artificial Sequence
  Alternative recoding mutagenesis oligo
gcgacgcgcattttttcgatatcttctggggtcttgattgagatagccatgattgtcctccttattcctttgccctcggacgagtgctgg

SEQ ID NO: 332 - DNA, 83 bp, Artificial Sequence
  Alternative recoding mutagenesis oligo
ggcacttacatatatattgtcggtatcaccgacgctgatggacagaattaaagcttgagcacgtgttgacaattaatcatcgg

SEQ ID NO: 333 - DNA, 104 bp, Artificial Sequence
  Alternative recoding mutagenesis oligo
cacttcggcagccagtcggccagcgacgcgcattttttcgatatcttctggggtcttgatactgatagccattaattctgtccatcagcgtcggtgataccgac

SEQ ID NO: 334 - DNA, 26 bp, Artificial Sequence
  Alternative recoding mutagenesis oligo
taacgggtctggtgaccgaagtgaac

SEQ ID NO: 335 - DNA, 104 bp, Artificial Sequence
  Alternative recoding mutagenesis oligo
cacttcggcagccagtcggccagcgacgcgcattttttcgatatcttctggggtcttgatgctgatagccattaattctgtccatcagcgtcggtgataccgac

SEQ ID NO: 336 - DNA, 26 bp, Artificial Sequence
  Alternative recoding mutagenesis oligo
taacgggtctggtgaccgaagtgaac

SEQ ID NO: 337 - DNA, 104 bp, Artificial Sequence
  Alternative recoding mutagenesis oligo
cacttcggcagccagtcggccagcgacgcgcattttttcgatatcttctggggtcttgatagagatagccattaattctgtccatcagcgtcggtgataccgac

SEQ ID NO: 338 - DNA, 26 bp, Artificial Sequence
  Alternative recoding mutagenesis oligo
taacgggtctggtgaccgaagtgaac

SEQ ID NO: 339 - DNA, 104 bp, Artificial Sequence
  Alternative recoding mutagenesis oligo
cacttcggcagccagtcggccagcgacgcgcattttttcgatatcttctggggtcttgatggagatagccattaattctgtccatcagcgtcggtgataccgac

SEQ ID NO: 340 - DNA, 26 bp, Artificial Sequence
  Alternative recoding mutagenesis oligo
taacgggtctggtgaccgaagtgaac

SEQ ID NO: 341 - DNA, 104 bp, Artificial Sequence
  Alternative recoding mutagenesis oligo
cacttcggcagccagtcggccagcgacgcgcattttttcgatatcttctggggtcttgattgtgatagccattaattctgtccatcagcgtcggtgataccgac

SEQ ID NO: 342 - DNA, 26 bp, Artificial Sequence
  Alternative recoding mutagenesis oligo
taacgggtctggtgaccgaagtgaac

SEQ ID NO: 343 - DNA, 104 bp, Artificial Sequence
  Alternative recoding mutagenesis oligo
cacttcggcagccagtcggccagcgacgcgcattttttcgatatcttctggggtcttgattaagatagccattaattctgtccatcagcgtcggtgataccgac

SEQ ID NO: 344 - DNA, 26 bp, Artificial Sequence
  Alternative recoding mutagenesis oligo
taacgggtctggtgaccgaagtgaac

SEQ ID NO: 345 - DNA, 83 bp, Artificial Sequence
  Alternative recoding mutagenesis oligo
gtcgcgtcgccaacctcacggttatcgtcagctcaaagaggcgcagagtgaagcttgagcacgtgttgacaattaatcatcgg

SEQ ID NO: 346 - DNA, 79 bp, Artificial Sequence
  Alternative recoding mutagenesis oligo
tgataaatggtaaaagtcatcttgctataacaaggcttgcagtggaataattattcctttgccctcggacgagtgctgg

SEQ ID NO: 347 - DNA, 106 bp, Artificial Sequence
  Alternative recoding mutagenesis oligo
ctcgtgtctagtcgcgtcgccaacctcacggttatcgtcagctcaaagaggcgcagagtgtgagttgcccgtttttcatgcggaaaaacagcgcaattatcaaaga

SEQ ID NO: 348 - DNA, 33 bp, Artificial Sequence
  Alternative recoding mutagenesis oligo
caccagcaagaagtgaaaaaactgtgagtaagc

SEQ ID NO: 349 - DNA, 83 bp, Artificial Sequence
  Alternative recoding mutagenesis oligo
tgattagcgtactcaatcgccggttaaccttgaccgctgtacaaggtataaagcttgagcacgtgttgacaattaatcatcgg

SEQ ID NO: 350 - DNA, 89 bp, Artificial Sequence
  Alternative recoding mutagenesis oligo
agattatgtatgccgcgtatcagcttcatgtctggctcaaaacagtgaaaatcgtccgagttattcctttgccctcggacgagtgctgg

SEQ ID NO: 351 - DNA, 28 bp, Artificial Sequence
  Alternative recoding mutagenesis oligo
aaaggtgaagacaaagccgctatcgaag

SEQ ID NO: 352 - DNA, 93 bp, Artificial Sequence
  Alternative recoding mutagenesis oligo
ggctgagattatgtatgccgcgtatcagcttcatgtctggctcaaaacaggctaaatcgtccgagtataccttgtacagcggtcaaggttaac

SEQ ID NO: 353 - DNA, 28 bp, Artificial Sequence
  Alternative recoding mutagenesis oligo
aaaggtgaagacaaagccgctatcgaag

SEQ ID NO: 354 - DNA, 93 bp, Artificial Sequence
  Alternative recoding mutagenesis oligo
ggctgagattatgtatgccgcgtatcagcttcatgtctggctcaaaacagactaaatcgtccgagtataccttgtacagcggtcaaggttaac

SEQ ID NO: 355 - DNA, 28 bp, Artificial Sequence
  Alternative recoding mutagenesis oligo
aaaggtgaagacaaagccgctatcgaag

SEQ ID NO: 356 - DNA, 93 bp, Artificial Sequence
  Alternative recoding mutagenesis oligo
ggctgagattatgtatgccgcgtatcagcttcatgtctggctcaaaacagggaaaatcgtccgagtataccttgtacagcggtcaaggttaac

SEQ ID NO: 357 - DNA, 28 bp, Artificial Sequence
  Alternative recoding mutagenesis oligo
aaaggtgaagacaaagccgctatcgaag

SEQ ID NO: 358 - DNA, 93 bp, Artificial Sequence
  Alternative recoding mutagenesis oligo
ggctgagattatgtatgccgcgtatcagcttcatgtctggctcaaaacagcgaaaatcgtccgagtataccttgtacagcggtcaaggttaac

SEQ ID NO: 359 - DNA, 28 bp, Artificial Sequence
  Alternative recoding mutagenesis oligo
aaaggtgaagacaaagccgctatcgaag

SEQ ID NO: 360 - DNA, 93 bp, Artificial Sequence
  Alternative recoding mutagenesis oligo
ggctgagattatgtatgccgcgtatcagcttcatgtctggctcaaaacagagaaaatcgtccgagtataccttgtacagcggtcaaggttaac
